(19) United States
(12) Patent Application Publication
(10) Pub. No.: US 2026/0159831 A1
(43) Pub. Date: Jun. 11, 2026

(54) ENGINEERED CONSTRUCTS FOR INCREASED TRANSCRIPTION OF RNA PAYLOADS

(71) Applicant: SHAPE THERAPEUTICS INC., Seattle, WA (US)

(72) Inventors: Stephen BURLEIGH, Seattle, WA (US); Duankun LEE, Seattle, WA (US); Adrian Wrangham BRIGGS, Seattle, WA (US)

(21) Appl. No.: 19/105,265

(22) PCT Filed: Aug. 23, 2023
(86) PCT No.: PCT/US2023/030982

§ 371 Date: Feb. 20, 2025

Related U.S. Application Data
(60) Provisional application No. 63/400,583, filed on Aug. 24, 2022.
(60) Provisional application No. 63/419,889, filed on Oct. 27, 2022.
(60) Provisional application No. 63/453,584, filed on Mar. 21, 2023.
(60) Provisional application No. 63/466,625, filed on May 15, 2023.

(51) Int. Cl. C12N 15/11; A61K 48/00; C12N 9/78; C12N 15/113; C12N 15/86

(52) U.S. Cl. CPC C12N 15/11; A61K 48/005; C12N 9/78; C12N 15/113; C12N 15/86; C12N 2310/11; C12N 2310/20; C12N 2750/14143

(57) ABSTRACT

Described herein are expression cassettes encoding small RNA payloads, such as engineered guide RNAs. The expression cassettes may be engineered to increase expression of the small RNA payload encoded by the expression cassette. The engineered expression cassettes include various sequence elements that may enhance expression of the small RNA payload, such as transcription factor binding sequences, transcriptional termination sequences, and core promoter sequences. Sequence elements may be combined or interchanged to tune small RNA payload expression levels. Also described herein are methods of editing a target gene using a small RNA payload encoded by an expression cassette.

### CROSS-REFERENCE

[0001] This application claims the benefit of U.S. Provisional Application No. 63/400,583, entitled “ENGINEERED CONSTRUCTS FOR INCREASED TRANSCRIPTION OF RNA PAYLOADS,” filed Aug. 24, 2022, U.S. Provisional Application No. 63/419,889, entitled “ENGINEERED CONSTRUCTS FOR INCREASED TRANSCRIPTION OF RNA PAYLOADS,” filed Oct. 27, 2022, U.S. Provisional Application No. 63/453,584, entitled “ENGINEERED CONSTRUCTS FOR INCREASED TRANSCRIPTION OF RNA PAYLOADS,” filed Mar. 21, 2023, and U.S. Provisional Application No. 63/466,625, entitled “ENGINEERED CONSTRUCTS FOR INCREASED TRANSCRIPTION OF RNA PAYLOADS,” filed May 15, 2023, which applications are incorporated herein by reference in their entireties.

### SEQUENCE LISTING

[0002] The instant application contains a Sequence Listing which has been submitted electronically in eXtensible Markup Language (XML) format and is hereby incorporated by reference in its entirety. Said XML copy, created on Aug. 21, 2023, is named “421688-712021_SL.xml” and is 1.29 megabytes in size.

### BACKGROUND

[0003] A wide variety of diseases and disorders are caused by mutations, deletions, altered expression, or altered splicing of genes. RNAs can serve as a mechanism for gene therapy, such as by editing a mutated RNA sequence associated with a disease. There is a need for expression cassettes to increase or modulate expression of RNA payloads.

### SUMMARY

[0004] In various aspects, the present disclosure provides an expression cassette comprising: a promoter sequence comprising a sequence having at least 80% sequence identity to any one of: a) SEQ ID NO: 17, SEQ ID NO: 1250, or SEQ ID NO: 1262; b) SEQ ID NO: 13 or SEQ ID NO: 15; or c) SEQ ID NO: 1241, SEQ ID NO: 1251, SEQ ID NO: 1252, SEQ ID NO: 1253, or SEQ ID NO: 1263; a payload sequence under transcriptional control of the promoter sequence, the payload sequence comprising a small RNA payload; and a termination sequence comprising a sequence having at least 80% identity to any one of: a) SEQ ID NO: 1002, SEQ ID NO: 1017, SEQ ID NO: 1264, or SEQ ID NO: 1265; or b) SEQ ID NO: 60, SEQ ID NO: 771, SEQ ID NO: 930, SEQ ID NO: 1007, SEQ ID NO: 1021, SEQ ID NO: 1242, SEQ ID NO: 1254, SEQ ID NO: 1255, SEQ ID NO: 1257, or SEQ ID NO: 1269.

[0005] In various aspects, the present disclosure provides an expression cassette comprising: a promoter sequence comprising a sequence having at least 80% sequence identity to any one of: a) SEQ ID NO: 17, SEQ ID NO: 1250, or SEQ ID NO: 1262; b) SEQ ID NO: 13 or SEQ ID NO: 15; or c) SEQ ID NO: 1241, SEQ ID NO: 1251, SEQ ID NO: 1252, SEQ ID NO: 1253, or SEQ ID NO: 1263; a payload sequence under transcriptional control of the promoter sequence, the payload sequence comprising a small RNA payload; and a termination sequence.

[0006] In various aspects, the present disclosure provides an expression cassette comprising: a promoter sequence; a payload sequence under transcriptional control of the promoter sequence, the payload sequence comprising a small RNA payload; and a termination sequence comprising a sequence having at least 80% identity to any one of: a) SEQ ID NO: 1002, SEQ ID NO: 1017, SEQ ID NO: 1264, or SEQ ID NO: 1265; or b) SEQ ID NO: 60, SEQ ID NO: 771, SEQ ID NO: 930, SEQ ID NO: 1007, SEQ ID NO: 1021, SEQ ID NO: 1242, SEQ ID NO: 1254, SEQ ID NO: 1255, SEQ ID NO: 1257, or SEQ ID NO: 1269.

[0007] In various aspects, the present disclosure provides an expression cassette comprising: a promoter sequence comprising a sequence having at least 80% sequence identity to any one of SEQ ID NO: 13-SEQ ID NO: 17, SEQ ID NO: 167-SEQ ID NO: 707, SEQ ID NO: 1241, SEQ ID NO: 1248-SEQ ID NO: 1253, or SEQ ID NO: 1259-SEQ ID NO: 1263; a payload sequence under transcriptional control of the promoter sequence, the payload sequence comprising a small RNA payload; and a termination sequence comprising a sequence having at least 80% identity to any one of SEQ ID NO: 60, SEQ ID NO: 708-SEQ ID NO: 1240, SEQ ID NO: 1242, SEQ ID NO: 1243-SEQ ID NO: 1247, SEQ ID NO: 1254-SEQ ID NO: 1257, SEQ ID NO: 1264-SEQ ID NO: 1272, SEQ ID NO: 1275, or SEQ ID NO: 1287-SEQ ID NO: 1289.

[0008] In various aspects, the present disclosure provides an expression cassette comprising: a promoter sequence comprising a sequence having at least 80% sequence identity to any one of SEQ ID NO: 13-SEQ ID NO: 17, SEQ ID NO: 167-SEQ ID NO: 707, SEQ ID NO: 1241, SEQ ID NO: 1248-SEQ ID NO: 1253, or SEQ ID NO: 1259-SEQ ID NO: 1263; a payload sequence under transcriptional control of the promoter sequence, the payload sequence comprising a small RNA payload; and a termination sequence.

[0009] In various aspects, the present disclosure provides an expression cassette comprising: a promoter sequence; a payload sequence under transcriptional control of the promoter sequence, the payload sequence comprising a small RNA payload; and a termination sequence comprising a sequence having at least 80% identity to any one of SEQ ID NO: 60, SEQ ID NO: 708-SEQ ID NO: 1240, SEQ ID NO: 1242, SEQ ID NO: 1243-SEQ ID NO: 1247, SEQ ID NO: 1254-SEQ ID NO: 1257, SEQ ID NO: 1264-SEQ ID NO: 1272, SEQ ID NO: 1275, or SEQ ID NO: 1287-SEQ ID NO: 1289.

[0010] In some aspects, the promoter sequence comprises a sequence having at least 90% sequence identity to any one of SEQ ID NO: 13-SEQ ID NO: 17, SEQ ID NO: 167-SEQ ID NO: 707, SEQ ID NO: 1241, SEQ ID NO: 1248-SEQ ID NO: 1253, or SEQ ID NO: 1259-SEQ ID NO: 1263. In some aspects, the promoter sequence comprises a sequence having at least 95% sequence identity to any one of SEQ ID NO: 13-SEQ ID NO: 17, SEQ ID NO: 167-SEQ ID NO: 707, SEQ ID NO: 1241, SEQ ID NO: 1248-SEQ ID NO: 1253, or SEQ ID NO: 1259-SEQ ID NO: 1263.

[0011] In some aspects, the termination sequence comprises a sequence having at least 90% sequence identity to any one of SEQ ID NO: 60, SEQ ID NO: 708-SEQ ID NO: 1240, SEQ ID NO: 1242, SEQ ID NO: 1243-SEQ ID NO: 1247, SEQ ID NO: 1254-SEQ ID NO: 1257, SEQ ID NO: 1264-SEQ ID NO: 1272, SEQ ID NO: 1275, or SEQ ID NO: 1287-SEQ ID NO: 1289. In some aspects, the termination sequence comprises a sequence having at least 95% sequence identity to any one of SEQ ID NO: 60, SEQ ID NO: 708-SEQ ID NO: 1240, SEQ ID NO: 1242, SEQ ID NO: 1243-SEQ ID NO: 1247, SEQ ID NO: 1254-SEQ ID NO: 1257, SEQ ID NO: 1264-SEQ ID NO: 1272, SEQ ID NO: 1275, or SEQ ID NO: 1287-SEQ ID NO: 1289.

[0012] In some aspects, the promoter sequence comprises SEQ ID NO: 17. In some aspects, the promoter sequence comprises SEQ ID NO: 1262. In some aspects, the promoter sequence comprises SEQ ID NO: 1250. In some aspects, the promoter sequence comprises SEQ ID NO: 1251. In some aspects, the promoter sequence comprises SEQ ID NO: 1252. In some aspects, the promoter sequence comprises SEQ ID NO: 1253.

[0013] In some aspects, the termination sequence comprises SEQ ID NO: 1264. In some aspects, the termination sequence comprises SEQ ID NO: 1265. In some aspects, the termination sequence comprises SEQ ID NO: 1254. In some aspects, the termination sequence comprises SEQ ID NO: 1255. In some aspects, the termination sequence comprises SEQ ID NO: 1257. In some aspects, the termination sequence comprises SEQ ID NO: 60. In some aspects, the termination sequence comprises SEQ ID NO: 1242. In some aspects, the termination sequence comprises SEQ ID NO: 1269. In some aspects, the termination sequence comprises SEQ ID NO: 1017.

[0014] In some aspects, the small RNA payload comprises an engineered guide RNA capable of hybridizing to a target sequence. In some aspects, the engineered guide RNA is at least 70%, at least 75%, at least 80%, at least 85%, at least 90%, at least 95%, or 100% reverse complementary to the target sequence. In some aspects, the engineered guide RNA comprises at least one base pair mismatch relative to the target sequence. In some aspects, the target sequence comprises an adenosine residue. In some aspects, the target sequence is an RNA sequence. In some aspects, the RNA sequence is a mRNA or a pre-mRNA.

[0015] In some aspects, the target sequence comprises a G to A mutation relative to a wild type sequence. In some aspects, the target sequence comprises a missense mutation or a nonsense mutation relative to a wild type sequence. In some aspects, the target sequence encodes α-synuclein (SNCA), peripheral myelin protein 22 (PMP22), double homeobox 4 (DUX4), leucine rich repeat kinase 2 (LRRK2), Tau (MAPT), progranulin (GRN), a duplication of the PMP22 associated with Charcot-Marie-Tooth disease type 1A (CMT1A), ATP-binding cassette sub-family A member 4 (ABCA4), amyloid precursor protein (APP), alpha-1 antitrypsin (SERPINA1), hexosaminidase A (HEXA), cystic fibrosis transmembrane conductance regulator (CFTR), lipase A (LIPA), glucosylceramidase beta (GBA), PTEN-induced kinase 1 (PINK1), or methyl CpG binding protein 2 (MECP2).

[0016] In some aspects, the payload sequence comprises at least 80%, at least 85%, at least 90%, at least 95%, or 100% sequence identity to SEQ ID NO: 1273, SEQ ID NO: 1274, or SEQ ID NO: 61. In some aspects, the small RNA payload comprises an antisense oligonucleotide, an siRNA, an shRNA, a miRNA, or a tracrRNA. In some aspects, the small RNA payload is not less than 20 nucleotide residues and not more than 500 nucleotide residues long. In some aspects, the small RNA payload is not less than 60 and not more than 100 residues long. In some aspects, the small RNA payload is not less than 80 and not more than 120 residues long. In some aspects, the small RNA payload is not less than 100 and not more than 140 residues long. In some aspects, the small RNA payload is not less than 130 and not more than 170 residues long. In some aspects, the payload sequence further comprises an Sm binding sequence or a hairpin sequence. In some aspects, the hairpin sequence comprises a U7 hairpin. In some aspects, the hairpin sequence comprises at least 80%, at least 85%, at least 90%, at least 95%, or 100% sequence identity to SEQ ID NO: 52 or SEQ ID NO: 54, or the Sm binding sequence comprises at least 80%, at least 85%, at least 90%, at least 95%, or 100% sequence identity to SEQ ID NO: 56 or SEQ ID NO: 58.

[0017] In some aspects, the expression cassette has a length of not less than 1300 nucleotide residues and not more than 2160 nucleotide residues. In some aspects, the expression cassette comprises at least 80% sequence identity to a U1 sequence or a U7 sequence. In some aspects, the U1 sequence is a mouse U1 sequence or a human U1 sequence. In some aspects, the U7 sequence is a mouse U7 sequence or a human U7 sequence.

[0018] In some aspects, the promoter sequence comprises a zinc finger 143 motif capable of recruiting a ZNF143 transcription factor. In some aspects, the promoter sequence comprises an OCT-1 transcription factor binding sequence capable of recruiting an OCT-1 transcription factor. In some aspects, the promoter sequence comprises a proximal sequence element capable of recruiting a SNAPc. In some aspects, the proximal sequence element is capable of integrator dependent recruitment of RNA polymerase II.

[0019] In some aspects, the small RNA payload is capable of forming a guide-target RNA scaffold comprising a structural feature upon hybridization of the small RNA payload to a target sequence. In some aspects, the structural feature is a bulge, a mismatch, an internal loop, a hairpin, or combinations thereof. In some aspects, the structural feature comprises the bulge, and wherein the bulge is a symmetric bulge. In some aspects, the structural feature comprises the bulge, and wherein the bulge is an asymmetric bulge. In some aspects, the structural feature comprises the internal loop, and wherein the internal loop is a symmetric internal loop. In some aspects, the structural feature comprises the internal loop, and wherein the internal loop is an asymmetric internal loop. In some aspects, the structural feature comprises the hairpin, and wherein the hairpin is a recruitment hairpin or a non-recruitment hairpin. In some aspects, the guide-target RNA scaffold comprises a Wobble base pair.

[0020] In various aspects, the present disclosure provides a recombinant polynucleotide encoding one or more of the expression cassettes as described herein.

[0021] In some aspects, the recombinant polynucleotide encodes two of the expression cassettes as described herein comprising a first promoter, a second promoter, a first termination sequence, and a second termination sequence. In some aspects, the first promoter and the second promoter are the same. In some aspects, the first promoter and the second promoter are different. In some aspects, the first termination sequence and the second termination sequence are the same. In some aspects, the first termination sequence and the second termination sequence are different. In some aspects, the first promoter comprises SEQ ID NO: 17. In some aspects, the second promoter comprises SEQ ID NO: 1262. In some aspects, the first termination sequence comprises SEQ ID NO: 1264. In some aspects, the second termination sequence comprises SEQ ID NO: 1265. In some aspects, (a) the first promotor sequence comprises SEQ ID NO: 17, the first termination sequence comprises SEQ ID NO: 1264, the second promotor sequence comprises SEQ ID NO: 1262 and the second termination sequence comprises SEQ ID NO: 1265; or (b) the first promotor sequence comprises SEQ ID NO: 17, the first termination sequence comprises SEQ ID NO: 1265, the second promotor sequence comprises SEQ ID NO: 1262 and the second termination sequence comprises SEQ ID NO: 1264.

[0022] In various aspects, the present disclosure provides a viral vector encapsidating the expression cassette as described herein or the recombinant polynucleotide as described herein.

[0023] In some aspects, the viral vector comprises two or more, three or more, or four or more expression cassettes as described herein. In some aspects, the viral vector is an adeno-associated viral vector. In some aspects, the adeno-associated viral vector is selected from the group consisting of AAV1, AAV2, AAV3, AAV4, AAV5, AAV6, AAV7, AAV8, AAV9, AAV 10, AAV11, AAV12, AAV13, AAV14, AAV15, AAV16, AAV-DJ, AAV-DJ/8, AAV-DJ/9, AAV1/2, AAV.rh8, AAV.rh10, AAV.rh20, AAV.rh39, AAV.Rh43, AAV.Rh74, AAV.v66, AAV.Oligo001, AAV.SCH9, AAV.r3.45, AAV.RHM4-1, AAV.hu37, AAV.Anc80, AAV.Anc80L65, AAV.7m8, AAV.PhP.eB, AAV.PhP.V1, AAV.PHP.B, AAV.PhB.C1, AAV.PhB.C2, AAV.PhB.C3, AAV.PhB.C6, AAV.cy5, AAV2.5, AAV2tYF, AAV3B, AAV.LK03, AAV.HSC1, AAV.HSC2, AAV.HSC3, AAV.HSC4, AAV.HSC5, AAV.HSC6, AAV.HSC7, AAV.HSC8, AAV.HSC9, AAV.HSC10, AAV.HSC11, AAV.HSC12, AAV.HSC13, AAV.HSC14, AAV.HSC15, AAV.HSC16, AAV.HSC17, AAVhu68, chimeras thereof, and combinations thereof.

[0024] In various aspects, the present disclosure provides a pharmaceutical composition comprising the expression cassette as described herein, the recombinant polynucleotide as described herein, or the viral vector as described herein and a pharmaceutically acceptable excipient, carrier, diluent, or combination thereof.

[0025] In various aspects, the present disclosure provides a method of expressing a small RNA payload in a cell, the method comprising delivering the expression cassette as described herein, the recombinant polynucleotide as described herein, the viral vector as described herein, or the pharmaceutical composition as described herein to a cell and expressing the small RNA payload encoded by the expression cassette in the cell.

[0026] In various aspects, the present disclosure provides a method of editing a target sequence, the method comprising: delivering the expression cassette as described herein, the recombinant polynucleotide as described herein, the viral vector as described herein, or the pharmaceutical composition as described herein to a cell encoding the target sequence; expressing the small RNA payload in the cell, wherein the small RNA payload comprises an engineered guide RNA capable of hybridizing to a target sequence; forming a guide-target RNA scaffold upon hybridization of the small RNA payload to the target sequence; recruiting an editing enzyme to the target sequence; and editing the target sequence with the editing enzyme.

[0027] In various aspects, the present disclosure provides a method of editing a target sequence, the method comprising: delivering an expression cassette to a cell encoding the target sequence, wherein the expression cassette comprises: a promoter sequence comprising a sequence having at least 80% sequence identity to any one of: a) SEQ ID NO: 17, SEQ ID NO: 1250, or SEQ ID NO: 1262; b) SEQ ID NO: 13 or SEQ ID NO: 15; or c) SEQ ID NO: 1241, SEQ ID NO: 1251, SEQ ID NO: 1252, SEQ ID NO: 1253, or SEQ ID NO: 1263; a payload sequence under transcriptional control of the promoter sequence, the payload sequence comprising a small RNA payload; and a termination sequence comprising a sequence having at least 80% identity to any one of: a) SEQ ID NO: 1002, SEQ ID NO: 1017, SEQ ID NO: 1264, or SEQ ID NO: 1265; or b) SEQ ID NO: 60, SEQ ID NO: 771, SEQ ID NO: 930, SEQ ID NO: 1007, SEQ ID NO: 1021, SEQ ID NO: 1242, SEQ ID NO: 1254, SEQ ID NO: 1255, SEQ ID NO: 1257, or SEQ ID NO: 1269; expressing the small RNA payload in the cell; forming a guide-target RNA scaffold upon hybridization of the small RNA payload to the target sequence; recruiting an editing enzyme to the target sequence; and editing the target sequence with the editing enzyme.

[0028] In various aspects, the present disclosure provides a method of editing a target sequence, the method comprising: delivering an expression cassette to a cell encoding the target sequence, wherein the expression cassette comprises: a promoter sequence comprising a sequence having at least 80% sequence identity to any one of: a) SEQ ID NO: 17, SEQ ID NO: 1250, or SEQ ID NO: 1262; b) SEQ ID NO: 13 or SEQ ID NO: 15; or c) SEQ ID NO: 1241, SEQ ID NO: 1251, SEQ ID NO: 1252, SEQ ID NO: 1253, or SEQ ID NO: 1263; a payload sequence under transcriptional control of the promoter sequence, the payload sequence comprising a small RNA payload; and a termination sequence; expressing the small RNA payload in the cell; forming a guide-target RNA scaffold upon hybridization of the small RNA payload to the target sequence; recruiting an editing enzyme to the target sequence; and editing the target sequence with the editing enzyme.

[0029] In various aspects, the present disclosure provides a method of editing a target sequence, the method comprising: delivering an expression cassette to a cell encoding the target sequence, wherein the expression cassette comprises: a promoter sequence; a payload sequence under transcriptional control of the promoter sequence, the payload sequence comprising a small RNA payload; and a termination sequence comprising a sequence having at least 80% identity to any one of: a) SEQ ID NO: 1002, SEQ ID NO: 1017, SEQ ID NO: 1264, or SEQ ID NO: 1265; or b) SEQ ID NO: 60, SEQ ID NO: 771, SEQ ID NO: 930, SEQ ID NO: 1007, SEQ ID NO: 1021, SEQ ID NO: 1242, SEQ ID NO: 1254, SEQ ID NO: 1255, SEQ ID NO: 1257, or SEQ ID NO: 1269; expressing the small RNA payload in the cell; forming a guide-target RNA scaffold upon hybridization of the small RNA payload to the target sequence; recruiting an editing enzyme to the target sequence; and editing the target sequence with the editing enzyme.

[0030] In various aspects, the present disclosure provides a method of editing a target sequence, the method comprising: delivering an expression cassette to a cell encoding the target sequence, wherein the expression cassette comprises: a promoter sequence comprising a sequence having at least 80% sequence identity to any one of SEQ ID NO: 13-SEQ ID NO: 17, SEQ ID NO: 167-SEQ ID NO: 707, SEQ ID NO: 1241, SEQ ID NO: 1248-SEQ ID NO: 1253, or SEQ ID NO: 1259-SEQ ID NO: 1263; a payload sequence under transcriptional control of the promoter sequence, the payload sequence comprising a small RNA payload; and a termination sequence comprising a sequence having at least 80% identity to any one of SEQ ID NO: 60, SEQ ID NO: 708-SEQ ID NO: 1240, SEQ ID NO: 1242, SEQ ID NO: 1243-SEQ ID NO: 1247, SEQ ID NO: 1254-SEQ ID NO: 1257, SEQ ID NO: 1264-SEQ ID NO: 1272, SEQ ID NO: 1275, or SEQ ID NO: 1287-SEQ ID NO: 1289; expressing the small RNA payload in the cell; forming a guide-target RNA scaffold upon hybridization of the small RNA payload to the target sequence; recruiting an editing enzyme to the target sequence; and editing the target sequence with the editing enzyme.

[0031] In various aspects, the present disclosure provides a method of editing a target sequence, the method comprising: delivering an expression cassette to a cell encoding the target sequence, wherein the expression cassette comprises: a promoter sequence comprising a sequence having at least 80% sequence identity to any one of SEQ ID NO: 13-SEQ ID NO: 17, SEQ ID NO: 167-SEQ ID NO: 707, SEQ ID NO: 1241, SEQ ID NO: 1248-SEQ ID NO: 1253, or SEQ ID NO: 1259-SEQ ID NO: 1263; a payload sequence under transcriptional control of the promoter sequence, the payload sequence comprising a small RNA payload; and a termination sequence; expressing the small RNA payload in the cell; forming a guide-target RNA scaffold upon hybridization of the small RNA payload to the target sequence; recruiting an editing enzyme to the target sequence; and editing the target sequence with the editing enzyme.

[0032] In various aspects, the present disclosure provides a method of editing a target sequence, the method comprising: delivering an expression cassette to a cell encoding the target sequence, wherein the expression cassette comprises: a promoter sequence; a payload sequence under transcriptional control of the promoter sequence, the payload sequence comprising a small RNA payload; and a termination sequence comprising a sequence having at least 80% identity to any one of SEQ ID NO: 60, SEQ ID NO: 708-SEQ ID NO: 1240, SEQ ID NO: 1242, SEQ ID NO: 1243-SEQ ID NO: 1247, SEQ ID NO: 1254-SEQ ID NO: 1257, SEQ ID NO: 1264-SEQ ID NO: 1272, SEQ ID NO: 1275, or SEQ ID NO: 1287-SEQ ID NO: 1289; expressing the small RNA payload in the cell; forming a guide-target RNA scaffold upon hybridization of the small RNA payload to the target sequence; recruiting an editing enzyme to the target sequence; and editing the target sequence with the editing enzyme.

[0033] In some aspects, the promoter sequence comprises SEQ ID NO: 17. In some aspects, the promoter sequence comprises SEQ ID NO: 1262. In some aspects, the promoter sequence comprises SEQ ID NO: 1250. In some aspects, the promoter sequence comprises SEQ ID NO: 1251. In some aspects, the promoter sequence comprises SEQ ID NO: 1252. In some aspects, the promoter sequence comprises SEQ ID NO: 1253.

[0034] In some aspects, the termination sequence comprises SEQ ID NO: 1264. In some aspects, the termination sequence comprises SEQ ID NO: 1265. In some aspects, the termination sequence comprises SEQ ID NO: 1254. In some aspects, the termination sequence comprises SEQ ID NO: 1255. In some aspects, the termination sequence comprises SEQ ID NO: 1257. In some aspects, the termination sequence comprises SEQ ID NO: 60. In some aspects, the termination sequence comprises SEQ ID NO: 1242. In some aspects, the termination sequence comprises SEQ ID NO: 1269. In some aspects, the termination sequence comprises SEQ ID NO: 1017.

[0035] In some aspects, the target sequence comprises a mutation relative to a wild type sequence. In some aspects, editing the target sequence corrects the mutation in the target sequence. In some aspects, the mutation is a missense mutation. In some aspects, the mutation is a nonsense mutation. In some aspects, the mutation is a G to A mutation. In some aspects, the mutation is associated with a disease. In some aspects, the disease is a synucleinopathy, Parkinson's disease, Lewy body dementia, multiple system atrophy, Charcot-Marie-Tooth disease, hereditary neuropathy with liability to pressure palsies, Yuan-Harel-Lupski syndrome, a tauopathy, Alzheimer's disease, frontotemporal dementia, progressive supranuclear palsy, corticobasal degeneration, chronic traumatic encephalopathy, autism, traumatic brain injury, Dravet syndrome, Crohn's disease, muscular dystrophy, B-cell leukemia, Dejerine-Sottas disease, Stargardt disease, alpha-1 antitrypsin deficiency, Tay-Sachs disease, cystic fibrosis, liposomal acid lipase deficiency, or Gaucher disease.

[0036] In some aspects, the target sequence encodes α-synuclein (SNCA), peripheral myelin protein 22 (PMP22), double homeobox 4 (DUX4), leucine rich repeat kinase 2 (LRRK2), Tau (MAPT), progranulin (GRN), a duplication of PMP22 associated with Charcot-Marie-Tooth disease type 1A (CMT1A), ATP-binding cassette sub-family A member 4 (ABCA4), amyloid precursor protein (APP), alpha-1 antitrypsin (SERPINA1), hexosaminidase A (HEXA), cystic fibrosis transmembrane conductance regulator (CFTR), lipase A (LIPA), glucosylceramidase beta (GBA), PTEN-induced kinase 1 (PINK1), or methyl CpG binding protein 2 (MECP2).

[0037] In some aspects, editing the target sequence comprises editing an untranslated region of the target. In some aspects, the untranslated region is a 5′ untranslated region or a 3′ untranslated region. In some aspects, the 3′ untranslated region is a polyadenylation sequence. In some aspects, editing the target sequence comprises editing a translation initiation site.

[0038] In some aspects, editing the target sequence alters expression of the target sequence. In some aspects, editing the target sequence increases expression of the target sequence. In some aspects, editing the target sequence decreases expression of the target sequence.

[0039] In various aspects, the present disclosure provides a method of treating a disease in a subject, the method comprising: administering to the subject a composition comprising the expression cassette as described herein, the recombinant polynucleotide as described herein, the viral vector as described herein, or the pharmaceutical composition as described herein; delivering the expression cassette to a cell of the subject; and expressing the small RNA payload in the cell, thereby treating the disease.

[0040] In various aspects, the present disclosure provides a method of treating a disease in a subject, the method comprising: administering to the subject a composition comprising an expression cassette comprising: a promoter sequence comprising a sequence having at least 80% sequence identity to any one of: a) SEQ ID NO: 17, SEQ ID NO: 1250, or SEQ ID NO: 1262; b) SEQ ID NO: 13 or SEQ ID NO: 15; or c) SEQ ID NO: 1241, SEQ ID NO: 1251, SEQ ID NO: 1252, SEQ ID NO: 1253, or SEQ ID NO: 1263; a payload sequence under transcriptional control of the promoter sequence, the payload sequence comprising a small RNA payload; and a termination sequence comprising a sequence having at least 80% identity to any one of: a) SEQ ID NO: 1002, SEQ ID NO: 1017, SEQ ID NO: 1264, or SEQ ID NO: 1265; or b) SEQ ID NO: 60, SEQ ID NO: 771, SEQ ID NO: 930, SEQ ID NO: 1007, SEQ ID NO: 1021, SEQ ID NO: 1242, SEQ ID NO: 1254, SEQ ID NO: 1255, SEQ ID NO: 1257, or SEQ ID NO: 1269; delivering the expression cassette to a cell of the subject; and expressing the small RNA payload in the cell, thereby treating the disease.

[0041] In various aspects, the present disclosure provides a method of treating a disease in a subject, the method comprising: administering to the subject a composition comprising an expression cassette comprising: a promoter sequence comprising a sequence having at least 80% sequence identity to any one of: a) SEQ ID NO: 17, SEQ ID NO: 1250, or SEQ ID NO: 1262; b) SEQ ID NO: 13 or SEQ ID NO: 15; or c) SEQ ID NO: 1241, SEQ ID NO: 1251, SEQ ID NO: 1252, SEQ ID NO: 1253 or SEQ ID NO: 1263; a payload sequence under transcriptional control of the promoter sequence, the payload sequence comprising a small RNA payload; and a termination sequence; delivering the expression cassette to a cell of the subject; and expressing the small RNA payload in the cell, thereby treating the disease.

[0042] In various aspects, the present disclosure provides a method of treating a disease in a subject, the method comprising: administering to the subject a composition comprising an expression cassette comprising: a promoter sequence; a payload sequence under transcriptional control of the promoter sequence, the payload sequence comprising a small RNA payload; and a termination sequence comprising a sequence having at least 80% identity to any one of: a) SEQ ID NO: 1002, SEQ ID NO: 1017, SEQ ID NO: 1264, or SEQ ID NO: 1265; or b) SEQ ID NO: 60, SEQ ID NO: 771, SEQ ID NO: 930, SEQ ID NO: 1007, SEQ ID NO: 1021, SEQ ID NO: 1242, SEQ ID NO: 1254, SEQ ID NO: 1255, SEQ ID NO: 1257, or SEQ ID NO: 1269; delivering the expression cassette to a cell of the subject; and expressing the small RNA payload in the cell, thereby treating the disease.

[0043] In various aspects, the present disclosure provides a method of treating a disease in a subject, the method comprising: administering to the subject a composition comprising an expression cassette comprising: a promoter sequence comprising a sequence having at least 80% sequence identity to any one of SEQ ID NO: 13-SEQ ID NO: 17, SEQ ID NO: 167-SEQ ID NO: 707, SEQ ID NO: 1241, SEQ ID NO: 1248-SEQ ID NO: 1253, or SEQ ID NO: 1259-SEQ ID NO: 1263; a payload sequence under transcriptional control of the promoter sequence, the payload sequence comprising a small RNA payload; and a termination sequence comprising a sequence having at least 80% identity to any one of SEQ ID NO: 60, SEQ ID NO: 708-SEQ ID NO: 1240, SEQ ID NO: 1242, SEQ ID NO: 1243-SEQ ID NO: 1247, SEQ ID NO: 1254-SEQ ID NO: 1257, SEQ ID NO: 1264-SEQ ID NO: 1272, SEQ ID NO: 1275, or SEQ ID NO: 1287-SEQ ID NO: 1289; delivering the expression cassette to a cell of the subject; and expressing the small RNA payload in the cell, thereby treating the disease.

[0044] In various aspects, the present disclosure provides a method of treating a disease in a subject, the method comprising: administering to the subject a composition comprising an expression cassette comprising: a promoter sequence comprising a sequence having at least 80% sequence identity to any one of SEQ ID NO: 13-SEQ ID NO: 17, SEQ ID NO: 167-SEQ ID NO: 707, SEQ ID NO: 1241, SEQ ID NO: 1248-SEQ ID NO: 1253, or SEQ ID NO: 1259-SEQ ID NO: 1263; a payload sequence under transcriptional control of the promoter sequence, the payload sequence comprising a small RNA payload; and a termination sequence; delivering the expression cassette to a cell of the subject; and expressing the small RNA payload in the cell, thereby treating the disease.

[0045] In various aspects, the present disclosure provides a method of treating a disease in a subject, the method comprising: administering to the subject a composition comprising an expression cassette comprising: a promoter sequence; a payload sequence under transcriptional control of the promoter sequence, the payload sequence comprising a small RNA payload; and a termination sequence comprising a sequence having at least 80% identity to any one of SEQ ID NO: 60, SEQ ID NO: 708-SEQ ID NO: 1240, SEQ ID NO: 1242, SEQ ID NO: 1243-SEQ ID NO: 1247, SEQ ID NO: 1254-SEQ ID NO: 1257, SEQ ID NO: 1264-SEQ ID NO: 1272, SEQ ID NO: 1275, or SEQ ID NO: 1287-SEQ ID NO: 1289; delivering the expression cassette to a cell of the subject; and expressing the small RNA payload in the cell, thereby treating the disease.

[0046] In some aspects, the promoter sequence comprises SEQ ID NO: 17. In some aspects, the promoter sequence comprises SEQ ID NO: 1262. In some aspects, the promoter sequence comprises SEQ ID NO: 1250. In some aspects, the promoter sequence comprises SEQ ID NO: 1251. In some aspects, the promoter sequence comprises SEQ ID NO: 1252. In some aspects, the promoter sequence comprises SEQ ID NO: 1253.

[0047] In some aspects, the termination sequence comprises SEQ ID NO: 1264. In some aspects, the termination sequence comprises SEQ ID NO: 1265. In some aspects, the termination sequence comprises SEQ ID NO: 1254. In some aspects, the termination sequence comprises SEQ ID NO: 1255. In some aspects, the termination sequence comprises SEQ ID NO: 1257. In some aspects, the termination sequence comprises SEQ ID NO: 60. In some aspects, the termination sequence comprises SEQ ID NO: 1242. In some aspects, the termination sequence comprises SEQ ID NO: 1269. In some aspects, the termination sequence comprises SEQ ID NO: 1017.

[0048] In some aspects, the disease is a synucleinopathy, Parkinson's disease, Lewy body dementia, multiple system atrophy, Charcot-Marie-Tooth disease, hereditary neuropathy with liability to pressure palsies, Yuan-Harel-Lupski syndrome, a tauopathy, Alzheimer's disease, frontotemporal dementia, progressive supranuclear palsy, corticobasal degeneration, chronic traumatic encephalopathy, autism, traumatic brain injury, Dravet syndrome, Crohn's disease, muscular dystrophy, B-cell leukemia, Dejerine-Sottas disease, Stargardt disease, alpha-1 antitrypsin deficiency, Tay-Sachs disease, cystic fibrosis, liposomal acid lipase deficiency, or Gaucher disease.

[0049] In some aspects, the small RNA payload comprises an engineered guide RNA that hybridizes to a target sequence, and wherein the cell encodes the target sequence. In some aspects, the target sequence encodes α-synuclein (SNCA), peripheral myelin protein 22 (PMP22), double homeobox 4 (DUX4), leucine rich repeat kinase 2 (LRRK2), Tau (MAPT), progranulin (GRN), a duplication of the PMP22 associated with Charcot-Marie-Tooth disease type 1A (CMT1A), ATP-binding cassette sub-family A member 4 (ABCA4), amyloid precursor protein (APP), alpha-1 antitrypsin (SERPINA1), hexosaminidase A (HEXA), cystic fibrosis transmembrane conductance regulator (CFTR), lipase A (LIPA), glucosylceramidase beta (GBA), PTEN-induced kinase 1 (PINK1), or methyl CpG binding protein 2 (MECP2).

[0050] In some aspects, the method further comprises forming a guide-target RNA scaffold upon hybridization of the engineered guide RNA to the target sequence, recruiting an editing enzyme to the target sequence, and editing the target sequence with the editing enzyme. In some aspects, the target sequence comprises a mutation relative to a wild type sequence. In some aspects, editing the target sequence corrects the mutation in the target sequence. In some aspects, the mutation is a missense mutation. In some aspects, the mutation is a nonsense mutation. In some aspects, the mutation is a G to A mutation. In some aspects, the mutation is associated with the disease. In some aspects, editing the target sequence comprises editing an untranslated region of the target. In some aspects, the untranslated region is a 5′ untranslated region or a 3′ untranslated region. In some aspects, the 3′ untranslated region is a polyadenylation sequence. In some aspects, editing the target sequence comprises editing a translation initiation site.

[0051] In some aspects, editing the target sequence alters expression of the target sequence. In some aspects, editing the target sequence increases expression of the target sequence. In some aspects, editing the target sequence decreases expression of the target sequence.

[0052] In some aspects, the guide-target RNA scaffold comprises a structural feature. In some aspects, the structural feature is a bulge, a mismatch, an internal loop, a hairpin, or combinations thereof. In some aspects, the structural feature comprises the bulge, and wherein the bulge is a symmetric bulge. In some aspects, the structural feature comprises the bulge, and wherein the bulge is an asymmetric bulge. In some aspects, the structural feature comprises the internal loop, and wherein the internal loop is a symmetric internal loop. In some aspects, the structural feature comprises the internal loop, and wherein the internal loop is an asymmetric internal loop. In some aspects, the structural feature comprises the hairpin, and wherein the hairpin is a recruitment hairpin or a non-recruitment hairpin. In some aspects, the guide-target RNA scaffold comprises a Wobble base pair.

[0053] In some aspects, the editing enzyme comprises an ADAR, an APOBEC, or a Cas nuclease. In some aspects, the ADAR comprises ADAR1, ADAR2, ADAR3, or combinations thereof. In some aspects, the target sequence comprises RNA or DNA. In some aspects, the target sequence is a mRNA or a pre-mRNA. In some aspects, editing the target sequence comprises deamidating a nucleotide of the target sequence. In some aspects, the target sequence is edited with an efficiency of at least 10%, at least 20%, or at least 25%.

[0054] In various aspects, the present disclosure provides an expression cassette comprising: a promoter sequence comprising: a zinc finger 143 motif, an OCT-1 transcription factor binding sequence, a proximal sequence element; a payload sequence under transcriptional control of the promoter sequence, the payload sequence comprising a small RNA payload; and a transcription termination sequence; wherein the expression cassette comprises one or more sequence elements selected from the group consisting of: a) the zinc finger 143 motif having at least 80% sequence identity to any one of SEQ ID NO: 24-SEQ ID NO: 26, b) the OCT-1 transcription factor binding sequence having at least 80% sequence identity to any one of SEQ ID NO: 27-SEQ ID NO: 30, c) the proximal sequence element having at least 80% sequence identity to any one of SEQ ID NO: 31-SEQ ID NO: 37, and d) combinations thereof.

[0055] In some aspects, the zinc finger 143 motif comprises at least 80%, at least 85%, at least 90%, at least 95%, or 100% sequence identity to any one of SEQ ID NO: 24-SEQ ID NO: 26. In some aspects, the zinc finger 143 motif comprises at least 80%, at least 85%, at least 90%, at least 95%, or 100% sequence identity to SEQ ID NO: 20. In some aspects, the OCT-1 transcription factor binding sequence comprises at least 80%, at least 85%, at least 90%, at least 95%, or 100% sequence identity to any one of SEQ ID NO: 27-SEQ ID NO: 30. In some aspects, the proximal sequence element comprises at least 80%, at least 85%, at least 90%, at least 95%, or 100% sequence identity to any one of SEQ ID NO: 31-SEQ ID NO: 37.

[0056] In some aspects, the transcription termination sequence comprises at least 80%, at least 85%, at least 90%, at least 95%, or 100% sequence identity to any one of SEQ ID NO: 40-SEQ ID NO: 42. In some aspects, the transcription termination sequence comprises at least 80%, at least 85%, at least 90%, at least 95%, or 100% sequence identity to SEQ ID NO: 60, SEQ ID NO: 1242-SEQ ID NO: 1247, or SEQ ID NO: 1254-SEQ ID NO: 1257. In some aspects, the transcription termination sequence comprises at least 80%, at least 85%, at least 90%, at least 95%, or 100% sequence identity to SEQ ID NO: 1242. In some aspects, the transcription termination sequence comprises a sequence of SEQ ID NO: 1242. In some aspects, the transcription termination sequence comprises at least 80%, at least 85%, at least 90%, at least 95%, or 100% sequence identity to SEQ ID NO: 60. In some aspects, the transcription termination sequence comprises a sequence of SEQ ID NO: 60. In some aspects, the transcription termination sequence comprises a sequence of SEQ ID NO: 38 or SEQ ID NO: 39.

[0057] In various aspects, the present disclosure provides an expression cassette comprising: a promoter sequence comprising a proximal sequence element, wherein the promoter sequence comprises a sequence having at least 75% sequence identity to any one of SEQ ID NO: 13-SEQ ID NO: 17, SEQ ID NO: 167-SEQ ID NO: 707, SEQ ID NO: 1241, SEQ ID NO: 1248-SEQ ID NO: 1253 in which the proximal sequence element of the promoter sequence is replaced with a sequence of any one of SEQ ID NO: 67-SEQ ID NO: 120; a payload sequence under transcriptional control of the promoter sequence, the payload sequence comprising a small RNA payload; and a transcription termination sequence comprising a 3′ box sequence element, wherein the transcription termination sequence comprises a sequence having at least 75% sequence identity to any one of SEQ ID NO: 60, SEQ ID NO: 708-SEQ ID NO: 1240, SEQ ID NO: 1242-SEQ ID NO: 1247, SEQ ID NO: 1254-SEQ ID NO: 1257 in which the 3′ box sequence element of the termination sequence is replaced with a sequence of any one of SEQ ID NO: 121-SEQ ID NO: 166.

[0058] In some aspects, the promoter sequence comprises a sequence having at least 80% sequence identity to any one of SEQ ID NO: 13-SEQ ID NO: 17, SEQ ID NO: 167-SEQ ID NO: 707, SEQ ID NO: 1241, SEQ ID NO: 1248-SEQ ID NO: 1253 in which the proximal sequence element of the promoter sequence is replaced with a sequence of any one of SEQ ID NO: 67-SEQ ID NO: 120. In some aspects, the promoter sequence comprises a sequence having at least 90% sequence identity to any one of SEQ ID NO: 13-SEQ ID NO: 17, SEQ ID NO: 167-SEQ ID NO: 707, SEQ ID NO: 1241, SEQ ID NO: 1248-SEQ ID NO: 1253 in which the proximal sequence element of the promoter sequence is replaced with a sequence of any one of SEQ ID NO: 67-SEQ ID NO: 120. In some aspects, the termination sequence comprises a sequence having at least 80% sequence identity to any one of SEQ ID NO: 60, SEQ ID NO: 708-SEQ ID NO: 1240, SEQ ID NO: 1242-SEQ ID NO: 1247, SEQ ID NO: 1254-SEQ ID NO: 1257 in which the 3′ box sequence element of the termination sequence is replaced with a sequence of any one of SEQ ID NO: 121-SEQ ID NO: 166. In some aspects, the termination sequence comprises a sequence having at least 90% sequence identity to any one of SEQ ID NO: 60, SEQ ID NO: 708-SEQ ID NO: 1240, SEQ ID NO: 1242-SEQ ID NO: 1247, SEQ ID NO: 1254-SEQ ID NO: 1257 in which the 3′ box sequence element of the termination sequence is replaced with a sequence of any one of SEQ ID NO: 121-SEQ ID NO: 166.

[0059] In various aspects, the present disclosure provides an expression cassette comprising a promoter sequence comprising a sequence having at least 75% sequence identity to any one of SEQ ID NO: 16-SEQ ID NO: 17, SEQ ID NO: 167-SEQ ID NO: 707, SEQ ID NO: 1241, SEQ ID NO: 1248-SEQ ID NO: 1253; a payload sequence under transcriptional control of the promoter sequence, the payload sequence comprising a small RNA payload; and a transcription termination sequence comprising a sequence having at least 75% sequence identity to any one of SEQ ID NO: 60, SEQ ID NO: 708-SEQ ID NO: 1240, SEQ ID NO: 1242-SEQ ID NO: 1247, SEQ ID NO: 1254-SEQ ID NO: 1257.

[0060] In some aspects, the promoter sequence comprises a sequence having at least 80% sequence identity to any one of SEQ ID NO: 16-SEQ ID NO: 17, SEQ ID NO: 167-SEQ ID NO: 707, SEQ ID NO: 1241, SEQ ID NO: 1248-SEQ ID NO: 1253. In some aspects, the promoter sequence comprises a sequence having at least 90% sequence identity to any one of SEQ ID NO: 16-SEQ ID NO: 17, SEQ ID NO: 167-SEQ ID NO: 707, SEQ ID NO: 1241, SEQ ID NO: 1248-SEQ ID NO: 1253. In some aspects, the termination sequence comprises a sequence having at least 80% sequence identity to any one of SEQ ID NO: 60, SEQ ID NO: 708-SEQ ID NO: 1240, SEQ ID NO: 1242-SEQ ID NO: 1247, SEQ ID NO: 1254-SEQ ID NO: 1257. In some aspects, the termination sequence comprises a sequence having at least 90% sequence identity to any one of SEQ ID NO: 60, SEQ ID NO: 708-SEQ ID NO: 1240, SEQ ID NO: 1242-SEQ ID NO: 1247, SEQ ID NO: 1254-SEQ ID NO: 1257.

[0061] In some aspects, the promoter sequence is SEQ ID NO: 376. In some aspects, the promoter sequence is SEQ ID NO: 1250. In some aspects, the transcription termination sequence is SEQ ID NO: 917. In some aspects, the transcription termination sequence is SEQ ID NO: 1254. In some aspects, the promoter sequence is SEQ ID NO: 168. In some aspects, the promoter sequence is SEQ ID NO: 1251. In some aspects, the transcription termination sequence is SEQ ID NO: 709. In some aspects, the transcription termination sequence is SEQ ID NO: 1255. In some aspects, the promoter sequence is SEQ ID NO: 1241. In some aspects, the transcription termination sequence is SEQ ID NO: 1242 or SEQ ID NO: 60. In some aspects, the promoter sequence is SEQ ID NO: 17. In some aspects, the transcription termination sequence is SEQ ID NO: 1242 or SEQ ID NO: 60.

[0062] In some aspects, the small RNA payload comprises an engineered guide RNA capable of hybridizing to a target sequence.

[0063] In some aspects, the engineered guide RNA is at least 70%, at least 75%, at least 80%, at least 85%, at least 90%, at least 95%, or 100% reverse complementary to the target sequence. In some aspects, the engineered guide RNA comprises at least one base pair mismatch relative to the target sequence. In some aspects, the target sequence comprises an adenosine residue. In some aspects, the target sequence is an RNA sequence. In some aspects, the RNA sequence is a mRNA or a pre-mRNA.

[0064] In some aspects, the target sequence comprises a G to A mutation relative to a wild type sequence. In some aspects, the target sequence comprises a missense mutation or a nonsense mutation relative to a wild type sequence. In some aspects, the target sequence encodes α-synuclein (SNCA), peripheral myelin protein 22 (PMP22), double homeobox 4 (DUX4), leucine rich repeat kinase 2 (LRRK2), Tau (MAPT), progranulin (GRN), a duplication of the PMP22 associated with Charcot-Marie-Tooth disease type 1A (CMT1A), ATP-binding cassette sub-family A member 4 (ABCA4), amyloid precursor protein (APP), alpha-1 antitrypsin (SERPINA1), hexosaminidase A (HEXA), cystic fibrosis transmembrane conductance regulator (CFTR), lipase A (LIPA), glucosylceramidase beta (GBA), PTEN-induced kinase 1 (PINK1), or methyl CpG binding protein 2 (MECP2). In some aspects, the payload sequence comprises at least 80%, at least 85%, at least 90%, at least 95%, or 100% sequence identity to SEQ ID NO: 1273, SEQ ID NO: 1274, or SEQ ID NO: 61.

[0065] In some aspects, the small RNA payload comprises an antisense oligonucleotide, an siRNA, an shRNA, a miRNA, or a tracrRNA. In some aspects, the small RNA payload is not less than 20 nucleotide residues and not more than 500 nucleotide residues long. In some aspects, the small RNA payload is not less than 60 and not more than 100 residues long. In some aspects, the small RNA payload is not less than 80 and not more than 120 residues long. In some aspects, the small RNA payload is not less than 100 and not more than 140 residues long. In some aspects, the small RNA payload is not less than 130 and not more than 170 residues long.

[0066] In some aspects, the payload sequence further comprises an Sm binding sequence or a hairpin sequence. In some aspects, the hairpin sequence comprises a U7 hairpin. In some aspects, the hairpin sequence comprises at least 80%, at least 85%, at least 90%, at least 95%, or 100% sequence identity to SEQ ID NO: 52, SEQ ID NO: 54, SEQ ID NO: 56, or SEQ ID NO: 58.

[0067] In some aspects, the expression cassette comprises two or more of the sequence elements. In some aspects, the expression cassette comprises three or more of the sequence elements. In some aspects, the expression cassette has a length of not less than 1300 nucleotide residues and not more than 2160 nucleotide residues. In some aspects, the expression cassette comprises at least 80% sequence identity to a U1 sequence or a U7 sequence. In some aspects, the U1 sequence is a mouse U1 sequence or a human U1 sequence. In some aspects, the U7 sequence is a mouse U7 sequence or a human U7 sequence.

[0068] In some aspects, the promoter sequence comprises at least 80%, at least 85%, at least 90%, at least 95%, or 100% sequence identity to any one of SEQ ID NO: 13-SEQ ID NO: 17, SEQ ID NO: 1241, SEQ ID NO: 1248-SEQ ID NO: 1253. In some aspects, the promoter sequence comprises at least 80%, at least 85%, at least 90%, at least 95%, or 100% sequence identity to SEQ ID NO: 1241. In some aspects, the promoter sequence comprises a sequence of SEQ ID NO: 1241. In some aspects, the transcription termination sequence is SEQ ID NO: 1242 or SEQ ID NO: 60. In some aspects, the promoter sequence comprises at least 80%, at least 85%, at least 90%, at least 95%, or 100% sequence identity to SEQ ID NO: 17. In some aspects, the promoter sequence comprises a sequence of SEQ ID NO: 17. In some aspects, the transcription termination sequence is SEQ ID NO: 1242 or SEQ ID NO: 60.

[0069] In some aspects, the expression cassette comprises at least 80%, at least 85%, at least 90%, at least 95%, or 100% sequence identity to any one of SEQ ID NO: 1-SEQ ID NO: 12 or SEQ ID NO: 59. In some aspects, the zinc finger 143 motif is capable of recruiting a ZNF143 transcription factor. In some aspects, the OCT-1 transcription factor binding sequence is capable of recruiting an OCT-1 transcription factor. In some aspects, the proximal sequence element is capable of recruiting a SNAPc. In some aspects, the proximal sequence element is capable of integrator dependent recruitment of RNA polymerase II.

[0070] In some aspects, the small RNA payload is capable of forming a guide-target RNA scaffold comprising a structural feature upon hybridization of the small RNA payload to a target sequence. In some aspects, the structural feature is a bulge, a mismatch, an internal loop, a hairpin, or combinations thereof. In some aspects, the structural feature comprises the bulge, and wherein the bulge is a symmetric bulge. In some aspects, the structural feature comprises the bulge, and wherein the bulge is an asymmetric bulge. In some aspects, the structural feature comprises the internal loop, and wherein the internal loop is a symmetric internal loop. In some aspects, the structural feature comprises the internal loop, and wherein the internal loop is an asymmetric internal loop. In some aspects, the structural feature comprises the hairpin, and wherein the hairpin is a recruitment hairpin or a non-recruitment hairpin. the guide-target RNA scaffold comprises a Wobble base pair.

[0071] In various aspects, the present disclosure provides a method of expressing a small RNA payload in a cell, the method comprising delivering an expression cassette as described herein to a cell and expressing the small RNA payload encoded by the expression cassette in the cell.

[0072] In various aspects, the present disclosure provides a method of editing a target sequence, the method comprising: delivering an expression cassette to a cell encoding the target sequence, wherein the expression cassette comprises: a promoter sequence comprising: a zinc finger 143 motif, an OCT-1 transcription factor binding sequence, and a proximal sequence element, a payload sequence under transcriptional control of the promoter sequence, the payload sequence comprising a small RNA payload, wherein the small RNA payload comprises an engineered guide RNA sequence capable of hybridizing to the target sequence, and a transcription termination sequence; expressing the small RNA payload in the cell; forming a guide-target RNA scaffold upon hybridization of the small RNA payload to the target sequence; recruiting an editing enzyme to the target sequence; and editing the target sequence with the editing enzyme.

[0073] In various aspects, the present disclosure provides a method of editing a target sequence, the method comprising: delivering an expression cassette to a cell encoding the target sequence, wherein the expression cassette comprises: a promoter sequence comprising a proximal sequence element, wherein the promoter sequence comprises a sequence having at least 75% sequence identity to any one of SEQ ID NO: 13-SEQ ID NO: 17, SEQ ID NO: 167-SEQ ID NO: 707, SEQ ID NO: 1241, SEQ ID NO: 1248-SEQ ID NO: 1253 in which the proximal sequence element of the promoter sequence is replaced with a sequence of any one of SEQ ID NO: 67-SEQ ID NO: 120; a payload sequence under transcriptional control of the promoter sequence, the payload sequence comprising a small RNA payload; and a transcription termination sequence comprising a 3′ box sequence element, wherein the transcription termination sequence comprises a sequence having at least 75% sequence identity to any one of SEQ ID NO: 60, SEQ ID NO: 708-SEQ ID NO: 1240, SEQ ID NO: 1242-SEQ ID NO: 1247, SEQ ID NO: 1254-SEQ ID NO: 1257 in which the 3′ box sequence element of the termination sequence is replaced with a sequence of any one of SEQ ID NO: 121-SEQ ID NO: 166; expressing the small RNA payload in the cell; forming a guide-target RNA scaffold upon hybridization of the small RNA payload to the target sequence; recruiting an editing enzyme to the target sequence; and editing the target sequence with the editing enzyme.

[0074] In various aspects, the present disclosure provides a method of editing a target sequence, the method comprising: delivering an expression cassette to a cell encoding the target sequence, wherein the expression cassette comprises: a promoter sequence comprising a proximal sequence element, wherein the promoter sequence comprises a sequence having at least 75% sequence identity to any one of SEQ ID NO: 16-SEQ ID NO: 17, SEQ ID NO: 167-SEQ ID NO: 707, SEQ ID NO: 1241, SEQ ID NO: 1248-SEQ ID NO: 1253; a payload sequence under transcriptional control of the promoter sequence, the payload sequence comprising a small RNA payload; and a transcription termination sequence comprising a 3′ box sequence element, wherein the transcription termination sequence comprises a sequence having at least 75% sequence identity to any one of SEQ ID NO: 60, SEQ ID NO: 708-SEQ ID NO: 1240, SEQ ID NO: 1242-SEQ ID NO: 1247, SEQ ID NO: 1254-SEQ ID NO: 1257; expressing the small RNA payload in the cell; forming a guide-target RNA scaffold upon hybridization of the small RNA payload to the target sequence; recruiting an editing enzyme to the target sequence; and editing the target sequence with the editing enzyme.

[0075] In various aspects, the promoter sequence is SEQ ID NO: 376. In various aspects, the promoter sequence is SEQ ID NO: 1250. In various aspects, the transcription termination sequence is SEQ ID NO: 917. In various aspects, the transcription termination sequence is SEQ ID NO: 1254. In various aspects, the promoter sequence is SEQ ID NO: 168. In various aspects, the promoter sequence is SEQ ID NO: 1251. In various aspects, transcription termination sequence is SEQ ID NO: 709. In various aspects, the transcription termination sequence is SEQ ID NO: 1255. In various aspects, the promoter sequence is SEQ ID NO: 1241. In various aspects, the transcription termination sequence is SEQ ID NO: 1242 or SEQ ID NO: 60. In various aspects, the promoter sequence is SEQ ID NO: 17. In various aspects, the transcription termination sequence is SEQ ID NO: 1242 or SEQ ID NO: 60.

[0076] In various aspects, the present disclosure provides a method of editing a target sequence, the method comprising: delivering the expression cassette as described herein to a cell encoding the target sequence; expressing the small RNA payload in the cell, wherein the small RNA payload comprises an engineered guide RNA capable of hybridizing to a target sequence; forming a guide-target RNA scaffold upon hybridization of the small RNA payload to the target sequence; recruiting an editing enzyme to the target sequence; and editing the target sequence with the editing enzyme.

[0077] In some aspects, the target sequence comprises a mutation relative to a wild type sequence. In some aspects, editing the target sequence corrects the mutation in the target sequence. In some aspects, the mutation is a missense mutation. In some aspects, the mutation is a nonsense mutation. In some aspects, the mutation is a G to A mutation. In some aspects, the mutation is associated with a disease.

[0078] In some aspects, the disease is a synucleinopathy, Parkinson's disease, Lewy body dementia, multiple system atrophy, Charcot-Marie-Tooth disease, hereditary neuropathy with liability to pressure palsies, Yuan-Harel-Lupski syndrome, a tauopathy, Alzheimer's disease, frontotemporal dementia, progressive supranuclear palsy, corticobasal degeneration, chronic traumatic encephalopathy, autism, traumatic brain injury, Dravet syndrome, Crohn's disease, muscular dystrophy, B-cell leukemia, Dejerine-Sottas disease, Stargardt disease, alpha-1 antitrypsin deficiency, Tay-Sachs disease, cystic fibrosis, liposomal acid lipase deficiency, or Gaucher disease. In some aspects, the target sequence encodes α-synuclein (SNCA), peripheral myelin protein 22 (PMP22), double homeobox 4 (DUX4), leucine rich repeat kinase 2 (LRRK2), Tau (MAPT), progranulin (GRN), a duplication of PMP22 associated with Charcot-Marie-Tooth disease type 1A (CMT1A), ATP-binding cassette sub-family A member 4 (ABCA4), amyloid precursor protein (APP), alpha-1 antitrypsin (SERPINA1), hexosaminidase A (HEXA), cystic fibrosis transmembrane conductance regulator (CFTR), lipase A (LIPA), glucosylceramidase beta (GBA), PTEN-induced kinase 1 (PINK1), or methyl CpG binding protein 2 (MECP2).

[0079] In some aspects, editing the target sequence comprises editing an untranslated region of the target. In some aspects, the untranslated region is a 5′ untranslated region or a 3′ untranslated region. In some aspects, the 3′ untranslated region is a polyadenylation sequence. In some aspects, editing the target sequence comprises editing a translation initiation site. In some aspects, editing the target sequence alters expression of the target sequence. In some aspects, editing the target sequence increases expression of the target sequence. In some aspects, editing the target sequence decreases expression of the target sequence.

[0080] In various aspects, the present disclosure provides a method of treating a disease in a subject, the method comprising: administering to the subject a composition comprising an expression cassette comprising: a promoter sequence comprising: a zinc finger 143 motif, an OCT-1 transcription factor binding sequence, and a proximal sequence element, and a payload sequence under transcriptional control of the promoter sequence, the payload sequence comprising a small RNA payload; delivering the expression cassette to a cell of the subject; and expressing the small RNA payload in the cell, thereby treating the disease.

[0081] In various aspects, the present disclosure provides a method of treating a disease in a subject, the method comprising: administering to the subject a composition comprising an expression cassette comprising: a promoter sequence comprising a proximal sequence element, wherein the promoter sequence comprises a sequence having at least 75% sequence identity to any one of SEQ ID NO: 13-SEQ ID NO: 17, SEQ ID NO: 167-SEQ ID NO: 707, SEQ ID NO: 1241, SEQ ID NO: 1248-SEQ ID NO: 1253 in which the proximal sequence element of the promoter sequence is replaced with a sequence of any one of SEQ ID NO: 67-SEQ ID NO: 120; a payload sequence under transcriptional control of the promoter sequence, the payload sequence comprising a small RNA payload; and a transcription termination sequence comprising a 3′ box sequence element, wherein the transcription termination sequence comprises a sequence having at least 75% sequence identity to any one of SEQ ID NO: 60, SEQ ID NO: 708-SEQ ID NO: 1240, SEQ ID NO: 1242-SEQ ID NO: 1247, SEQ ID NO: 1254-SEQ ID NO: 1257 in which the 3′ box sequence element of the termination sequence is replaced with a sequence of any one of SEQ ID NO: 121-SEQ ID NO: 166; delivering the expression cassette to a cell of the subject; and expressing the small RNA payload in the cell, thereby treating the disease.

[0082] In various aspects, the present disclosure provides a method of treating a disease in a subject, the method comprising: administering to the subject a composition comprising an expression cassette comprising: a promoter sequence comprising a proximal sequence element, wherein the promoter sequence comprises a sequence having at least 75% sequence identity to any one of SEQ ID NO: 16-SEQ ID NO: 17, SEQ ID NO: 167-SEQ ID NO: 707, SEQ ID NO: 1241, SEQ ID NO: 1248-SEQ ID NO: 1253; a payload sequence under transcriptional control of the promoter sequence, the payload sequence comprising a small RNA payload; and a transcription termination sequence comprising a 3′ box sequence element, wherein the transcription termination sequence comprises a sequence having at least 75% sequence identity to any one of SEQ ID NO: 60, SEQ ID NO: 708-SEQ ID NO: 1240, SEQ ID NO: 1242-SEQ ID NO: 1247, SEQ ID NO: 1254-SEQ ID NO: 1257; delivering the expression cassette to a cell of the subject; and expressing the small RNA payload in the cell, thereby treating the disease.

[0083] In some aspects, the promoter sequence is SEQ ID NO: 376. In some aspects, the promoter sequence is SEQ ID NO: 1250. In some aspects, the transcription termination sequence is SEQ ID NO: 917. In some aspects, the transcription termination sequence is SEQ ID NO: 1254. In some aspects, the promoter sequence is SEQ ID NO: 168. In some aspects, the promoter sequence is SEQ ID NO: 1251. In some aspects, the transcription termination sequence is SEQ ID NO: 709. In some aspects, the transcription termination sequence is SEQ ID NO: 1255. In some aspects, the promoter sequence is SEQ ID NO: 1241. In some aspects, the transcription termination sequence is SEQ ID NO: 1242 or SEQ ID NO: 60. In some aspects, the promoter sequence is SEQ ID NO: 17. In some aspects, the transcription termination sequence is SEQ ID NO: 1242 or SEQ ID NO: 60.

[0084] In various aspects, the present disclosure provides a method of treating a disease in a subject, the method comprising: administering to the subject a composition comprising an expression cassette as described herein; delivering the expression cassette to a cell of the subject; and expressing a small RNA payload in the cell, thereby treating the disease.

[0085] In some aspects, the disease is a synucleinopathy, Parkinson's disease, Lewy body dementia, multiple system atrophy, Charcot-Marie-Tooth disease, hereditary neuropathy with liability to pressure palsies, Yuan-Harel-Lupski syndrome, a tauopathy, Alzheimer's disease, frontotemporal dementia, progressive supranuclear palsy, corticobasal degeneration, chronic traumatic encephalopathy, autism, traumatic brain injury, Dravet syndrome, Crohn's disease, muscular dystrophy, B-cell leukemia, Dejerine-Sottas disease, Stargardt disease, alpha-1 antitrypsin deficiency, Tay-Sachs disease, cystic fibrosis, liposomal acid lipase deficiency, or Gaucher disease. In some aspects, the target sequence encodes α-synuclein (SNCA), peripheral myelin protein 22 (PMP22), double homeobox 4 (DUX4), leucine rich repeat kinase 2 (LRRK2), Tau (MAPT), progranulin (GRN), a duplication of the PMP22 associated with Charcot-Marie-Tooth disease type 1A (CMT1A), ATP-binding cassette sub-family A member 4 (ABCA4), amyloid precursor protein (APP), alpha-1 antitrypsin (SERPINA1), hexosaminidase A (HEXA), cystic fibrosis transmembrane conductance regulator (CFTR), lipase A (LIPA), glucosylceramidase beta (GBA), PTEN-induced kinase 1 (PINK1), or methyl CpG binding protein 2 (MECP2). In some aspects, the small RNA payload comprises an engineered guide RNA that hybridizes to a target sequence, and wherein the cell encodes the target sequence.

[0086] In some aspects, the method further comprises forming a guide-target RNA scaffold upon hybridization of the engineered guide RNA to the target sequence, recruiting an editing enzyme to the target sequence, and editing the target sequence with the editing enzyme. In some aspects, the target sequence comprises a mutation relative to a wild type sequence. In some aspects, editing the target sequence corrects the mutation in the target sequence. In some aspects, the mutation is a missense mutation. In some aspects, the mutation is a nonsense mutation. In some aspects, the mutation is a G to A mutation. In some aspects, the mutation is associated with the disease.

[0087] In some aspects, editing the target sequence comprises editing an untranslated region of the target. In some aspects, the untranslated region is a 5′ untranslated region or a 3′ untranslated region. In some aspects, the 3′ untranslated region is a polyadenylation sequence. In some aspects, editing the target sequence comprises editing a translation initiation site. In some aspects, editing the target sequence alters expression of the target sequence. In some aspects, editing the target sequence increases expression of the target sequence. In some aspects, editing the target sequence decreases expression of the target sequence.

[0088] In some aspects, the guide-target RNA scaffold comprises a structural feature. In some aspects, the structural feature is a bulge, a mismatch, an internal loop, a hairpin, or combinations thereof. In some aspects, the structural feature comprises the bulge, and wherein the bulge is a symmetric bulge. In some aspects, the structural feature comprises the bulge, and wherein the bulge is an asymmetric bulge. In some aspects, the structural feature comprises the internal loop, and wherein the internal loop is a symmetric internal loop. In some aspects, the structural feature comprises the internal loop, and wherein the internal loop is an asymmetric internal loop. In some aspects, the structural feature comprises the hairpin, and wherein the hairpin is a recruitment hairpin or a non-recruitment hairpin. In some aspects, the guide-target RNA scaffold comprises a Wobble base pair.

[0089] In some aspects, the editing enzyme comprises an ADAR, an APOBEC, or a Cas nuclease. In some aspects, the ADAR comprises ADAR1, ADAR2, ADAR3, or combinations thereof. In some aspects, the target sequence comprises RNA or DNA. In some aspects, the target sequence is a mRNA or a pre-mRNA. In some aspects, editing the target sequence comprises deamidating a nucleotide of the target sequence. In some aspects, the target sequence is edited with an efficiency of at least 10%, at least 20%, or at least 25%.

[0090] In some aspects, the expression cassette is delivered to the cell via a viral vector. In some aspects, the viral vector is an adenoviral vector, an adeno-associated viral vector, or a lentivector. In some aspects, the adeno-associated viral vector is selected from the group consisting of AAV1, AAV2, AAV3, AAV4, AAV5, AAV6, AAV7, AAV8, AAV9, AAV 10, AAV11, AAV12, AAV13, AAV14, AAV15, AAV16, AAV-DJ, AAV-DJ/8, AAV-DJ/9, AAV1/2, AAV.rh8, AAV.rh10, AAV.rh20, AAV.rh39, AAV.Rh43, AAV.Rh74, AAV.v66, AAV.Oligo001, AAV.SCH9, AAV.r3.45, AAV.RHM4-1, AAV.hu37, AAV.Anc80, AAV.Anc80L65, AAV.7m8, AAV.PhP.eB, AAV.PhP.V1, AAV.PHP.B, AAV.PhB.C1, AAV.PhB.C2, AAV.PhB.C3, AAV.PhB.C6, AAV.cy5, AAV2.5, AAV2tYF, AAV3B, AAV.LK03, AAV.HSC1, AAV.HSC2, AAV.HSC3, AAV.HSC4, AAV.HSC5, AAV.HSC6, AAV.HSC7, AAV.HSC8, AAV.HSC9, AAV.HSC10, AAV.HSC11, AAV.HSC12, AAV.HSC13, AAV.HSC14, AAV.HSC15, AAV.HSC16, AAV.HSC17, AAVhu68, chimeras thereof, and combinations thereof.

[0091] In various aspects, the present disclosure provides a viral vector encapsidating an expression cassette as described herein.

[0092] In some aspects, the viral vector is an adeno-associated viral vector. In some aspects, the adeno-associated viral vector is selected from the group consisting of AAV1, AAV2, AAV3, AAV4, AAV5, AAV6, AAV7, AAV8, AAV9, AAV 10, AAV11, AAV12, AAV13, AAV14, AAV15, AAV16, AAV-DJ, AAV-DJ/8, AAV-DJ/9, AAV1/2, AAV.rh8, AAV.rh10, AAV.rh20, AAV.rh39, AAV.Rh43, AAV.Rh74, AAV.v66, AAV.Oligo001, AAV.SCH9, AAV.r3.45, AAV.RHM4-1, AAV.hu37, AAV.Anc80, AAV.Anc80L65, AAV.7m8, AAV.PhP.eB, AAV.PhP.V1, AAV.PHP.B, AAV.PhB.C1, AAV.PhB.C2, AAV.PhB.C3, AAV.PhB.C6, AAV.cy5, AAV2.5, AAV2tYF, AAV3B, AAV.LK03, AAV.HSC1, AAV.HSC2, AAV.HSC3, AAV.HSC4, AAV.HSC5, AAV.HSC6, AAV.HSC7, AAV.HSC8, AAV.HSC9, AAV.HSC10, AAV.HSC11, AAV.HSC12, AAV.HSC13, AAV.HSC14, AAV.HSC15, AAV.HSC16, AAV.HSC17, AAVhu68, chimeras thereof, and combinations thereof.

[0093] In various aspects, the present disclosure provides a pharmaceutical composition comprising an expression cassette as described herein or a viral vector as described herein and a pharmaceutically acceptable excipient, carrier, diluent, or combination thereof.

### INCORPORATION BY REFERENCE

[0094] All publications, patents, and patent applications mentioned in this specification are herein incorporated by reference to the same extent as if each individual publication, patent, or patent application was specifically and individually indicated to be incorporated by reference.

### BRIEF DESCRIPTION OF THE DRAWINGS

[0095] The novel features of the invention are set forth with particularity in the appended claims. A better understanding of the features and advantages of the present invention will be obtained by reference to the following detailed description that sets forth illustrative embodiments, in which the principles of the invention are utilized, and the accompanying drawings of which:

[0096] FIG. 1A schematically illustrates an example configuration of an engineered guide RNA expression cassette based on a mouse U7 (mU7) promoter. The expression cassette encodes a payload sequence under transcriptional control of a mU7 promoter. The mU7 promoter includes an SPH element (e.g., a zinc finger 143 motif), an OCT-1 transcription factor binding sequence, and a proximal sequence element (PSE). The payload sequence, which begins at the transcriptional start site and ends at the termination sequence, includes an engineered guide RNA sequence (“guide”) operably linked to an Sm binding sequence (smOPT).

[0097] FIG. 1B schematically illustrates an example configuration of an engineered guide RNA expression cassette based on a human U1 (hU1) promoter. The expression cassette encodes a payload sequence under transcriptional control of an hU1 promoter. The hU1promoter includes an SPH element (e.g., a zinc finger 143 motif), an OCT-1 transcription factor binding sequence, and a proximal sequence element (PSE). The payload sequence, which begins at the transcriptional start site and ends at the termination sequence, includes an engineered guide RNA sequence (“guide”) operably linked to an Sm binding sequence (smOPT).

[0098] FIG. 2A schematically illustrates a reporter construct for measuring expression of an engineered guide RNA sequence and subsequent editing of the target RNA sequence. The report construct includes a target sequence (e.g., CDS1) containing an ATG start site that can be edited to ITG, read as GTG, by ADAR-catalyzed deamidation. Conversion of ATG to GTG results in an increase in luciferase (NanoLuc) expression.

[0099] FIG. 2B shows a bar plot of a luciferase assay demonstrating editing of a reporter construct by an engineered guide RNA construct. The unedited (ATG) construct expresses basal levels of luciferase, resulting in background levels of luciferase activity. The edited (GTG) construct expresses higher levels of luciferase, resulting in elevated luciferase activity relative to that of the unedited construct.

[0100] FIG. 3 shows a bar plot of a luciferase activity in the presence of unedited (A) or edited (G) reporters of SEQ ID NO: 48 (“fPMP22-cDNA (ATG)”), SEQ ID NO: 49 (“fSNCA-pre (ATG)”), and SEQ ID NO: 50 (“fSNCA-cDNA (ATG)”). For each reporter, the edited construct expressed higher levels of luciferase, resulting in increased levels of luciferase activity, relative to the unedited constructs.

[0101] FIG. 4 schematically illustrates a workflow for generating and evaluating expression of an expression cassette constructs. Cells are transfected with engineered guide RNA-encoding plasmids, and engineered guide RNA expression is evaluated by luciferase activity. Expression of the engineered guide RNA can be further evaluated using mirVANA total RNA isolation, DNaseI treatment, ddPCR guide quantification assays, or Sanger editing.

[0102] FIG. 5 shows a bar plot of a luciferase assay to evaluate expression of an SNCA-targeting engineered guide RNA (SEQ ID NO: 1274) under control of a mouse U7 promoter with various OCT-1 transcription factor binding sequences. The original OCT-1 transcription factor binding sequence (SEQ ID NO: 21) in the SNCA-targeting guide RNA expression cassette (SEQ ID NO: 6) was replaced with variant OCT-1 transcription factor binding sequences of each of SEQ ID NO: 27-SEQ ID NO: 30 or a random sequence of SEQ ID NO: 45 or a duplicated random sequence of SEQ ID NO: 46. A construct encoding only a GFP cassette (“GFP Control”) was used as a negative control. Higher luciferase activity was indicative of increased engineered guide RNA expression.

[0103] FIG. 6 shows a bar plot of a luciferase assay to evaluate expression of an SNCA-targeting engineered guide RNA (SEQ ID NO: 1274) under control of a mouse U7 promoter with various zinc finger 143 motifs. The original zinc finger 143 motif (SEQ ID NO: 20) in the SNCA-targeting guide RNA expression cassette (SEQ ID NO: 6) was replaced with variant zinc finger 143 motifs of each of SEQ ID NO: 24-SEQ ID NO: 26 or a random sequence of SEQ ID NO: 43. A construct encoding only a GFP cassette (“GFP Control”) was used as a negative control. Higher luciferase activity was indicative of increased engineered guide RNA expression.

[0104] FIG. 7 shows a bar plot of a luciferase assay to evaluate expression of an SNCA-targeting engineered guide RNA (SEQ ID NO: 1274) under control of a mouse U7 promoter with various proximal sequence elements (PSEs). The original PSE (SEQ ID NO: 22) in the SNCA-targeting guide RNA expression cassette (SEQ ID NO: 6) was replaced with variant PSEs of each of SEQ ID NO: 31-SEQ ID NO: 37 or a random sequence of SEQ ID NO: 44. A construct encoding only a GFP cassette (“GFP Control”) was used as a negative control. Higher luciferase activity was indicative of increased engineered guide RNA expression.

[0105] FIG. 8 shows a bar plot of a luciferase assay to evaluate expression of an SNCA-targeting engineered guide RNA (SEQ ID NO: 1274) under control of a mouse U7 promoter with various transcriptional termination sequences. The original termination sequence (SEQ ID NO: 23) in the SNCA-targeting guide RNA expression cassette (SEQ ID NO: 6) was replaced with variant termination sequences of each of SEQ ID NO: 40-SEQ ID NO: 42 or a random sequence of SEQ ID NO: 47. A construct encoding only a GFP cassette (“GFP Control”) was used as a negative control. Higher luciferase activity was indicative of increased engineered guide RNA expression.

[0106] FIG. 9A shows a bar plot of a luciferase assay to evaluate expression of a PMP22-targeting engineered guide RNA (SEQ ID NO: 1273) under control of a mouse U7 promoter with various combinations of engineered sequence elements. SEQ ID NO: 2 contained a variant PSE of SEQ ID NO: 31 relative to SEQ ID NO: 1. SEQ ID NO: 3 contained a variant termination sequence of SEQ ID NO: 41 relative to SEQ ID NO: 1. SEQ ID NO: 4 contained a variant PSE of SEQ ID NO: 31 and a variant termination sequence of SEQ ID NO: 41 relative to SEQ ID NO: 1. SEQ ID NO: 5 contained a variant PSE of SEQ ID NO: 31, a variant termination sequence of SEQ ID NO: 41, and a variant OCT-1 transcription factor binding sequence of SEQ ID NO: 28 relative to SEQ ID NO: 1. Expression was quantified relative to a construct encoding only a GFP cassette (“GFP”). Higher luciferase activity was indicative of increased guide RNA expression.

[0107] FIG. 9B shows a bar plot of a luciferase assay to evaluate expression of an SNCA-targeting engineered guide RNA (SEQ ID NO: 1274) under control of a mouse U7 promoter with various combinations of engineered sequence elements. Expression of the SNCA-targeting guide RNA was also tested under control of a human U1 promoter (SEQ ID NO: 13) and a human U7 promoter (SEQ ID NO: 14). SEQ ID NO: 9 contained a variant PSE of SEQ ID NO: 31 relative to SEQ ID NO: 6. SEQ ID NO: 10 contained a variant termination sequence of SEQ ID NO: 41 relative to SEQ ID NO: 6. SEQ ID NO: 11 contained a variant PSE of SEQ ID NO: 31 and a variant termination sequence of SEQ ID NO: 41 relative to SEQ ID NO: 6. SEQ ID NO: 12 contained a variant PSE of SEQ ID NO: 31, a variant termination sequence of SEQ ID NO: 41, and a variant OCT-1 transcription factor binding sequence of SEQ ID NO: 28 relative to SEQ ID NO: 6. Expression was quantified relative to a construct encoding only a GFP cassette (“GFP”). Higher luciferase activity was indicative of increased guide RNA expression.

[0108] FIG. 10A shows a bar plot of a guide quantification assay to evaluate expression of a PMP22-targeting engineered guide RNA (SEQ ID NO: 1273) under control of a mouse U7 promoter with various combinations of engineered sequence elements. SEQ ID NO: 2 contained a variant PSE of SEQ ID NO: 31 relative to SEQ ID NO: 1. SEQ ID NO: 3 contained a variant termination sequence of SEQ ID NO: 41 relative to SEQ ID NO: 1. SEQ ID NO: 4 contained a variant PSE of SEQ ID NO: 31 and a variant termination sequence of SEQ ID NO: 41 relative to SEQ ID NO: 1. SEQ ID NO: 5 contained a variant PSE of SEQ ID NO: 31, a variant termination sequence of SEQ ID NO: 41, and a variant OCT-1 transcription factor binding sequence of SEQ ID NO: 28 relative to SEQ ID NO: 1. Expression was quantified relative to a construct encoding only a GFP cassette (“GFP”). Higher guide to GAPDH ratio was indicative of increased guide RNA expression.

[0109] FIG. 10B shows a bar plot of a guide quantification assay to evaluate expression of an SNCA-targeting engineered guide RNA (SEQ ID NO: 1274) under control of a mouse U7 promoter with various combinations of engineered sequence elements. Expression of the SNCA-targeting guide RNA was also tested under control of a human U1 promoter (SEQ ID NO: 13) and a human U7 promoter (SEQ ID NO: 14). SEQ ID NO: 9 contained a variant PSE of SEQ ID NO: 31 relative to SEQ ID NO: 6. SEQ ID NO: 10 contained a variant termination sequence of SEQ ID NO: 41 relative to SEQ ID NO: 6. SEQ ID NO: 11 contained a variant PSE of SEQ ID NO: 31 and a variant termination sequence of SEQ ID NO: 41 relative to SEQ ID NO: 6. SEQ ID NO: 12 contained a variant PSE of SEQ ID NO: 31, a variant termination sequence of SEQ ID NO: 41, and a variant OCT-1 transcription factor binding sequence of SEQ ID NO: 28 relative to SEQ ID NO: 6. Expression was quantified relative to a construct encoding only a GFP cassette (“GFP”). Higher guide to GAPDH ratio was indicative of increased guide RNA expression.

[0110] FIG. 11A shows a bar plot of Sanger editing of an ATG sequence to GTG to evaluate expression and editing activity of a PMP22-targeting engineered guide RNA (SEQ ID NO: 1273) under control of a mouse U7 promoter with various combinations of engineered sequence elements. SEQ ID NO: 2 contained a variant PSE of SEQ ID NO: 31 relative to SEQ ID NO: 1. SEQ ID NO: 3 contained a variant termination sequence of SEQ ID NO: 41 relative to SEQ ID NO: 1. SEQ ID NO: 4 contained a variant PSE of SEQ ID NO: 31 and a variant termination sequence of SEQ ID NO: 41 relative to SEQ ID NO: 1. SEQ ID NO: 5 contained a variant PSE of SEQ ID NO: 31, a variant termination sequence of SEQ ID NO: 41, and a variant OCT-1 transcription factor binding sequence of SEQ ID NO: 28 relative to SEQ ID NO: 1. A construct encoding only a GFP cassette (“GFP”) was used as a negative control. Higher editing percent was indicative of increased guide RNA expression.

[0111] FIG. 11B shows a bar plot of Sanger editing of an ATG sequence to GTG to evaluate expression and editing activity of an SNCA-targeting engineered guide RNA (SEQ ID NO: 1274) under control of a mouse U7 promoter with various combinations of engineered sequence elements. SEQ ID NO: 9 contained a variant PSE of SEQ ID NO: 31 relative to SEQ ID NO: 6. SEQ ID NO: 10 contained a variant termination sequence of SEQ ID NO: 41 relative to SEQ ID NO: 6. SEQ ID NO: 11 contained a variant PSE of SEQ ID NO: 31 and a variant termination sequence of SEQ ID NO: 41 relative to SEQ ID NO: 6. SEQ ID NO: 12 contained a variant PSE of SEQ ID NO: 31, a variant termination sequence of SEQ ID NO: 41, and a variant OCT-1 transcription factor binding sequence of SEQ ID NO: 28 relative to SEQ ID NO: 6. A construct encoding only a GFP cassette (“GFP”) was used as a negative control. Higher editing percent was indicative of increased guide RNA expression.

[0112] FIG. 12A shows a bar plot of Sanger editing of −3 position residue to evaluate expression and editing activity of a PMP22-targeting engineered guide RNA (SEQ ID NO: 1273) under control of a mouse U7 promoter with various combinations of engineered sequence elements. SEQ ID NO: 2 contained a variant PSE of SEQ ID NO: 31 relative to SEQ ID NO: 1. SEQ ID NO: 3 contained a variant termination sequence of SEQ ID NO: 41 relative to SEQ ID NO: 1. SEQ ID NO: 4 contained a variant PSE of SEQ ID NO: 31 and a variant termination sequence of SEQ ID NO: 41 relative to SEQ ID NO: 1. SEQ ID NO: 5 contained a variant PSE of SEQ ID NO: 31, a variant termination sequence of SEQ ID NO: 41, and a variant OCT-1 transcription factor binding sequence of SEQ ID NO: 28 relative to SEQ ID NO: 1. A construct encoding only a GFP cassette (“GFP”) was used as a negative control. Higher editing percent was indicative of increased guide RNA expression.

[0113] FIG. 12B shows a bar plot of Sanger editing of a −5 position residue to evaluate expression and editing activity of an SNCA-targeting engineered guide RNA (SEQ ID NO: 1274) under control of a mouse U7 promoter with various combinations of engineered sequence elements. SEQ ID NO: 9 contained a variant PSE of SEQ ID NO: 31 relative to SEQ ID NO: 6. SEQ ID NO: 10 contained a variant termination sequence of SEQ ID NO: 41 relative to SEQ ID NO: 6. SEQ ID NO: 11 contained a variant PSE of SEQ ID NO: 31 and a variant termination sequence of SEQ ID NO: 41 relative to SEQ ID NO: 6. SEQ ID NO: 12 contained a variant PSE of SEQ ID NO: 31, a variant termination sequence of SEQ ID NO: 41, and a variant OCT-1 transcription factor binding sequence of SEQ ID NO: 28 relative to SEQ ID NO: 6. A construct encoding only a GFP cassette (“GFP”) was used as a negative control. Higher editing percent was indicative of increased guide RNA expression.

[0114] FIG. 13A shows a scatter plot with a linear fit showing the correlation between the results of the guide quantification assay of FIG. 10B and the luciferase assay of FIG. 9B.

[0115] FIG. 13B shows a scatter plot with a linear fit showing the correlation between the results of the Sanger editing assay of FIG. 11B and the luciferase assay of FIG. 9B.

[0116] FIG. 13C shows a scatter plot with a linear fit showing the correlation between the results of the guide quantification assay of FIG. 10B and the Sanger editing assay of FIG. 11B.

[0117] FIG. 14A shows a scatter plot with a linear fit showing the correlation between the results of the guide quantification assay of FIG. 10A and the luciferase assay of FIG. 9A.

[0118] FIG. 14B shows a scatter plot with a linear fit showing the correlation between the results of the Sanger editing assay of FIG. 12A and the luciferase assay of FIG. 9A.

[0119] FIG. 14C shows a scatter plot with a linear fit showing the correlation between the results of the guide quantification assay of FIG. 10A and the Sanger editing assay of FIG. 11A.

[0120] FIG. 15 shows a sequence with a single copy of a promoter variant integrated into the genome of a HEK293T cell (left) and a comparison of copy integration of an engineered guide RNA targeting RAB7A (top of FIG. 15 (Cont.)), GAPDH (middle of FIG. 15 (Cont.)), and SNCA (bottom of FIG. 15 (Cont.)). FIG. 15 discloses SEQ ID NO: 1283 and SEQ ID NO: 1284, respectively, in order of appearance.

[0121] FIG. 16 shows a legend of various exemplary structural features present in guide-target RNA scaffolds formed upon hybridization of a latent guide RNA of the present disclosure to a target RNA. Example structural features shown include an 8/7 asymmetric loop (i., 8 nucleotides on the target RNA side and 7 nucleotides on the guide RNA side), a 2/2 symmetric bulge (ii., 2 nucleotides on the target RNA side and 2 nucleotides on the guide RNA side), a 1/1 mismatch (iii., 1 nucleotide on the target RNA side and 1 nucleotide on the guide RNA side), a 5/5 symmetric internal loop (iv., 5 nucleotides on the target RNA side and 5 nucleotides on the guide RNA side), a 24 bp region (v., 24 nucleotides on the target RNA side base paired to 24 nucleotides on the guide RNA side), and a 2/3 asymmetric bulge (vi., 2 nucleotides on the target RNA side and 3 nucleotides on the guide RNA side). FIG. 16 discloses SEQ ID NO: 1285 and SEQ ID NO: 1286, respectively, in order of appearance.

[0122] FIG. 17A shows bar charts quantifying expression of an SNCA-targeting guide RNA (SEQ ID NO: 1274, left) or a PMP22-targeting guide RNA (SEQ ID NO: 1273, right) in ARPE-19 cells. Expression of the SNCA-targeting guide RNA in ARPE-19 cells (left) was compared for an expression cassette under control of a wild type mouse U7 promoter (SEQ ID NO: 6) or an expression cassette under control of an engineered mouse U7 promoter (SEQ ID NO: 12). Expression of the PMP22-targeting guide RNA in ARPE-19 cells (right) was compared for an expression cassette under control of a wild type mouse U7 promoter (SEQ ID NO: 1) or an expression cassette under control of an engineered mouse U7 promoter (SEQ ID NO: 5). The engineered expression cassettes of SEQ ID NO: 12 and SEQ ID NO: 5 included an engineered promoter of SEQ ID NO: 17, comprising an OCT-1 transcription factor binding sequence of SEQ ID NO: 28 and a PSE of SEQ ID NO: 31, and an engineered termination sequence of SEQ ID NO: 60, comprising a termination sequence motif of SEQ ID NO: 41. Expression was quantified relative to a construct encoding only a GFP cassette (“GFP”). Higher guide to GAPDH ratio was indicative of increased guide RNA expression.

[0123] FIG. 17B shows a bar chart quantifying expression of a SERPINA1-targeting guide RNA (SEQ ID NO: 61) in HepG2 cells. Expression of the SERPINA1-targeting guide RNA in HepG2 cells was compared for an expression cassette under control of a wild type mouse U7 promoter (“mU7-WT”) or an expression cassette under control of an engineered mouse U7 promoter (SEQ ID NO: 59). The engineered expression cassette of SEQ ID NO: 59 included an engineered promoter of SEQ ID NO: 16, comprising a PSE of SEQ ID NO: 31, and an engineered termination sequence of SEQ ID NO: 60, comprising a termination sequence motif of SEQ ID NO: 41. Expression was quantified relative to a construct encoding only a GFP cassette (“GFP”). Higher guide to GAPDH ratio was indicative of increased guide RNA expression.

[0124] FIG. 18 shows exemplary novel promoters of the present disclosure tested on antisense oligonucleotides for clinically relevant Duchenne muscular dystrophy (DMD) exon skipping in differentiated muscle cells. Engineered guide RNA expressing constructs were randomly integrated into the genome and evaluated after 10 days of myocyte differentiation.

[0125] FIG. 19A shows exemplary combinations of promoters, promoter variants, 3′ box termination sequence, and truncated 3′box termination sequence of the present disclosure for driving guide RNA expression.

[0126] FIG. 19B shows exemplary combinations of promoters, promoter variants, 3′ box termination sequence, and truncated 3′box termination sequence of the present disclosure for driving guide RNA expression.

[0127] FIG. 20A shows a bar chart quantifying expression of PMP22-targeting guide RNAs with a luciferase reporter (Reporter 1) in HEK293 cells. Expression of the PMP22-targeting guide RNA in HEK293 cells by PMP22-targeting engineered guide RNA constructs with the engineered promoter elements included in SEQ ID NO: 2, SEQ ID NO: 3, and SEQ ID NO: 5 had increased fold expression relative to the control mU7 wildtype guide RNA construct (SEQ ID NO: 1).

[0128] FIG. 20B shows a bar chart quantifying expression of SNCA-targeting guide RNAs with a luciferase reporter (Reporter 2) in HEK293 cells. Expression of the Reporter 2 guide RNA in HEK293 cells by the SNCA-targeting engineered guide RNA constructs with the engineered promoter elements included in SEQ ID NO: 9, SEQ ID NO: 10, and SEQ ID NO: 12 had increased fold expression relative to the control mU7 wildtype guide RNA construct (SEQ ID NO: 6).

[0129] FIG. 21A shows a bar chart with the left panel quantifying expression of a PMP22-targeting guide RNA with a luciferase reporter (Reporter 1) in HEK293T cells. Expression of the Reporter 1 guide RNA in HEK293T cells by PMP22-targeting engineered guide RNA constructs with the engineered promoter elements included in SEQ ID NO: 5 had increased fold expression relative to the control mU7 wildtype guide RNA construct (SEQ ID NO: 1), as well as increased expression when compared to a control PMP22-targeting guide RNA under the control of a wildtype human U1 promoter (SEQ ID NO: 13). Negative control expression was also quantified by a construct encoding only a GFP cassette (“GFP ctrl”). The right panel of FIG. 21A shows a bar chart quantifying expression of a SNCA-targeting guide RNA with a luciferase reporter (Reporter 2) in HEK293T cells. Expression of the Reporter 2 guide RNA in HEK293T cells by the SNCA-targeting engineered guide RNA constructs with the engineered promoter elements included in SEQ ID NO: 12 had increased fold expression relative to the control mU7 wildtype guide RNA construct (SEQ ID NO: 6). Negative control expression was also quantified by a construct encoding only a GFP cassette (“GFP ctrl”).

[0130] FIG. 21B shows a bar chart with a left panel quantifying expression of a PMP22-targeting guide RNA with a luciferase reporter (Reporter 1) in HEK293T cells. Expression of the Reporter 1 guide RNA in HEK293T cells by the engineered PMP22-targeting guide RNA under the control of the engineered hU1 promoter (SEQ ID NO: 1241) had greater fold expression relative to a control PMP22-targeting guide RNA under the control of the wildtype human U1 promoter (SEQ ID NO: 13). Negative control expression was also quantified by a construct encoding only a GFP cassette (“GFP”). The right panel of FIG. 21B shows a bar chart quantifying expression of a SNCA-targeting guide RNA with a luciferase reporter (Reporter 2) in HEK293T cells. Expression of the Reporter 2 guide RNA in HEK293T cells by the engineered SNCA-targeting guide RNA under the control of the engineered hU1 promoter (SEQ ID NO: 1241) had greater fold expression relative to the control hU1 wildtype guide RNA construct (SEQ ID NO: 7). Negative control expression was also quantified by a construct encoding only a GFP cassette (“GFP”).

[0131] FIG. 22A shows a bar chart quantifying expression of a SNCA guide RNA for constructs comprising a promoter sequence comprising a full-length WT mU7 promoter sequence (SEQ ID NO: 15), a variant of the WT mU7 promoter sequence with a 100 base deletion between the DSE and PSE promoter elements (SEQ ID NO: 1248), an engineered mU7 promoter sequence (SEQ ID NO: 17), or a variant of the engineered mU7 promoter sequence with a 100 base deletion between the DSE and PSE promoter elements (SEQ ID NO: 1249). Guide RNA expression was quantified via ddPCR and normalized to a housekeeping gene (GAPDH). Higher guide RNA expression to GAPDH expression (gRNA/GAPDH) ratio was indicative of increased guide RNA expression.

[0132] FIG. 22B shows a bar chart quantifying expression of a PMP22 guide RNA for expression cassette constructs comprising a promoter sequence comprising a full-length WT mU7 promoter sequence (SEQ ID NO: 15), a variant of the WT mU7 promoter sequence with a 100 base deletion between the DSE and PSE promoter elements (SEQ ID NO: 1248), an engineered mU7 promoter sequence (SEQ ID NO: 17), or a variant of the engineered mU7 promoter sequence with a 100 base deletion between the DSE and PSE promoter elements (SEQ ID NO: 1249). Guide RNA expression was quantified via ddPCR and normalized to a housekeeping gene (GAPDH). Higher guide RNA expression to GAPDH expression (gRNA/GAPDH) ratio was indicative of increased guide RNA expression.

[0133] FIG. 23 shows a bar chart quantifying Rab7a editing in expression cassette constructs comprising a promoter sequence comprising a full-length WT mU7 promoter sequence (SEQ ID NO: 15), a variant of the WT mU7 promoter sequence with a 50 base deletion between the DSE and PSE promoter elements (SEQ ID NO: 1258), a variant of the WT mU7 promoter sequence with a 75 base deletion between the DSE and PSE promoter elements (SEQ ID NO: 1259), a variant of the WT mU7 promoter sequence with a 100 base deletion between the DSE and PSE promoter elements (SEQ ID NO: 1248), a variant of the WT mU7 promoter sequence with a 126 base deletion between the DSE and PSE promoter elements (SEQ ID NO: 1260), and a variant of the WT mU7 promoter sequence with a 135 base deletion between the DSE and PSE promoter elements (SEQ ID NO: 1261).

[0134] FIG. 24 shows a bar chart quantifying expression of GFP by expression constructs with Herpesvirus saimiri U-RNA elements (HSUR). The HSUR elements were extracted from NCBI NC_001350 and incorporated downstream of a gRNA cassette with a RNU5B1 promoter (SEQ ID NO: 1250) and a GFP gRNA which targets a GFP-G67R reporter wherein deamination of an AGA codon to GGA restores fluorescence in a correlative fashion. The expression constructs were introduced as single copy by BxbI integrase and enriched by puromycin for 14 days. The GFP expression was quantified by the geometric mean of fluorescence intensity (GFP gMFI) by flow cytometry and cells were gated for mCherry fluorescence upstream to enable graphing only of the cells which were positive for the cassette. The GFP expression was quantified for expression constructs comprising the termination sequences of SEQ ID NO: 1266-SEQ ID NO: 1272 and compared to the expression of GFP from an expression construct with a termination sequence of SEQ ID NO: 1254.

[0135] FIG. 25A shows a bar chart quantifying expression of a GFP guide RNA for expression cassette constructs comprising a promoter sequence of SEQ ID NO: 17 and a termination sequence of SEQ ID NO: 60 (SEQ ID NO: 17/SEQ ID NO: 60), a promoter sequence of SEQ ID NO: 15 and a termination sequence of SEQ ID NO: 1243 (SEQ ID NO: 15/SEQ ID NO: 1243), a promoter sequence of SEQ ID NO: 1250 and a termination sequence of SEQ ID NO: 1254 (SEQ ID NO: 1250/SEQ ID NO: 1254), a promoter sequence of SEQ ID NO: 1252 and a termination sequence of SEQ ID NO: 1256 (SEQ ID NO: 1252/SEQ ID NO: 1256), a promoter sequence of SEQ ID NO: 1251 and a termination sequence of SEQ ID NO: 1255 (SEQ ID NO: 1251/SEQ ID NO: 1255), or a promoter sequence of SEQ ID NO: 1253 and a termination sequence of SEQ ID NO: 1257 (SEQ ID NO: 1253/SEQ ID NO: 1257). Guide RNA expression was quantified via ddPCR and normalized to a housekeeping gene (GAPDH). Higher guide RNA expression to GAPDH expression (gRNA/GAPDH) ratio was indicative of increased guide RNA expression.

[0136] FIG. 25B shows a bar chart quantifying expression of a SNCA guide RNA for expression cassette constructs comprising a promoter sequence of SEQ ID NO: 17 and a termination sequence of SEQ ID NO: 60 (SEQ ID NO: 17/SEQ ID NO: 60), a promoter sequence of SEQ ID NO: 15 and a termination sequence of SEQ ID NO: 1243 (SEQ ID NO: 15/SEQ ID NO: 1243), a promoter sequence of SEQ ID NO: 1250 and a termination sequence of SEQ ID NO: 1254 (SEQ ID NO: 1250/SEQ ID NO: 1254), a promoter sequence of SEQ ID NO: 1252 and a termination sequence of SEQ ID NO: 1256 (SEQ ID NO: 1252/SEQ ID NO: 1256), a promoter sequence of SEQ ID NO: 1251 and a termination sequence of SEQ ID NO: 1255 (SEQ ID NO: 1251/SEQ ID NO: 1255), or a promoter sequence of SEQ ID NO: 1253 and a termination sequence of SEQ ID NO: 1257 (SEQ ID NO: 1253/SEQ ID NO: 1257). Guide RNA expression was quantified via ddPCR and normalized to a housekeeping gene (GAPDH). Higher guide RNA expression to GAPDH expression (gRNA/GAPDH) ratio was indicative of increased guide RNA expression.

[0137] FIG. 26 shows a schematic of a flow-seq pipeline for screening of promoter or termination sequences. The screen begins with a pool of HEK293 cells with a single attp1 sequence. The next intermediate generated contains two cassettes, one with the GFP-G67R ORF which has no fluorescence but a BFP for indication of enrichment. The second cassette contains Blasticidin resistance as well as the BxbI integrase. The library of promoters or termination sequences are cloned into a plasmid containing mCherry and puromycin resistance. The pooled promoter or termination sequence plasmid prep can be transfected into the intermediate cells and enriched for integrations by puromycin resistance with mCherry as a marker of enrichment.

[0138] FIG. 27 shows the results from the flowseq analysis described in FIG. 26, with the points representing the normalized performance of each termination sequence pooled from each of three promoter sequences. The arrow-indicated data points indicate superior termination sequences that were advanced into a single copy assessment including SEQ ID NO: 1254 and SEQ ID NO: 1255 that showed similar expression compared to a WT mU7 termination sequence (SEQ ID NO: 1243).

[0139] FIG. 28 shows a bar chart quantifying expression of GFP by expression constructs with the termination sequences identified in the flowseq screen, as described in FIG. 27. The GFP expression was quantified by the geometric mean of fluorescence intensity (GFP gMFI) by flow cytometry. The GFP expression was quantified for expression cassettes comprising termination sequences of SEQ ID NO: 712, SEQ ID NO: 868, SEQ ID NO: 1021, SEQ ID NO: 930, SEQ ID NO: 1017, SEQ ID NO: 1254, SEQ ID NO: 771, SEQ ID NO: 906, SEQ ID NO: 1007, and SEQ ID NO: 1002 and were compared to the engineered mU7 termination sequence of SEQ ID NO: 60.

### DETAILED DESCRIPTION

[0140] The present disclosure provides expression cassettes for expressing RNA payloads. The expression cassettes described herein may be engineered for increased expression of the encoded RNA payload sequence. In some embodiments, certain elements of the expression cassette, such as enhancer sequences, core promoter sequences, or transcriptional termination sequences, may be engineered for enhanced payload expression. These sequence elements may be engineered from various endogenous promoters, such as U1, U6, or U7 promoters, for increased payload expression. The individual sequence elements of the expression cassette may be engineered to enhance expression of the encoded RNA payload.

### Promoters and Termination Sequences

[0141] An expression cassette of the present disclosure may include a promoter sequence, an RNA payload coding sequence, and a termination sequence. The promoter may recruit transcription factors, polymerases (e.g., RNA polymerase II or RNA polymerase III), or other transcriptional machinery to promote transcription of the RNA payload. For example, the expression cassette may promote transcription of a guide RNA for RNA editing, a guide RNA for DNA editing, a tracrRNA, an siRNA, an shRNA, or a miRNA, or an antisense oligonucleotide). In some embodiments, the promoter may be engineered for increased expression of the RNA payload under transcriptional control of the promoter. The termination sequence may enhance termination of transcription and promote transcriptional turnover, increasing transcription of the payload. In some embodiments, the termination sequence may be engineered for enhanced expression of the RNA payload. Sequence elements within the promoter or termination sequence (e.g., transcription factor binding sequences, transcription initiation sequences, termination sequences, or combinations thereof) may be engineered for enhanced payload expression. The sequence elements may be interchangeable with sequence elements from endogenous RNA promoters, such as U1, U6, or U7 promoters.

[0142] An expression cassette may be engineered from an endogenous sequence. For example, an expression cassette may be engineered from an endogenous U1, U2, U3, U4, U5, U6, or U7 sequence. The endogenous sequence may be from any organism, including human, mouse, or other mammals. In some embodiments, an expression cassette may comprise a promoter engineered from an endogenous promoter, such as an endogenous U1, U2, U3, U4, U5, U6, or U7 promoter. In some embodiments, an expression cassette may comprise a transcriptional termination sequence engineered from an endogenous transcriptional termination sequence, such as an endogenous U1, U2, U3, U4, U5, U6, or U7 transcriptional termination sequence.

[0143] The present disclosure provides for regulatory elements that serve to enhance optimal expression of a small RNA payload, such as an engineered guide RNA. Regulatory elements can refer to a number of different regions in the native human genome, but as disclosed here, have been screened in large format assays to identify the combination of regulatory elements that provides for enhanced guide RNA expression. An expression cassette of the present disclosure includes both regulatory elements and payloads. For example, an expression cassette may include regulatory elements that comprise portions of native human genome or native mouse genome promoter regions. In some embodiments, the expression cassette may include regulatory elements that comprise Herpesvirus saimiri U-RNA (HSUR) elements. In some embodiments, the expression cassette may include regulatory elements that comprise mutated versions of native human genome promoter regions or mutated versions of native mouse genome promoter regions. In some embodiments, a vector of the present disclosure provides for two expression cassettes in which a native promoter region and a mutated promoter region are present. The expression cassettes of the present disclosure are engineered to position the promoter region 5′, or upstream, of a therapeutic payload (e.g., a small RNA sequence such as an engineered guide RNA).

[0144] Furthermore, regulatory elements can comprise portions of native human genome termination regions, native mouse genome termination sequences, or Herpesvirus saimiri U-RNA (HSUR) termination sequences. The regulatory elements can also comprise portions of mutated human genome termination regions or mutated mouse genome termination sequences. In some embodiments, a vector of the present disclosure provides for two expression cassettes in which a native termination region and a mutated termination region are present. The expression cassettes of the present disclosure are engineered to position the termination region 3′, or downstream, of the therapeutic payload.

[0145] The promoter regions of the present disclosure can be broken down into multiple elements, including (from 5′ to 3′) a distal sequence element (DSE) and a proximal sequence element (PSE). These different elements can play different roles in the rate and efficiency of transcription of the downstream payload. In some embodiments, the PSE is part of a core promoter region. The PSE may be bound by the snRNA activating protein complex (SNAPc). SNAPc is a transcription factor important for transcription initiation and may facilitate binding or recruitment of additional transcription factors (e.g., TBP, TFIIA, TFIIB, TFIIE and TFIIF). In some embodiments, the DSE is part of an enhancer region. The DSE may bind factors that help to stabilize transcription factors and transcription machinery on the PSE. In some embodiments, the DSE comprises an SPH element that recruits the STAF transcription factor (e.g., ZNF143 transcription factor). The STAF transcription factor (e.g., ZNF143 transcription factor) is a zinc finger protein and comprises activation domains that can active RNA polymerase promoters (e.g., mRNA-type RNA polymerase II promoters, type 3 RNA polymerase III promoters, and RNA polymerase II snRNA promoters). SPH elements may also comprise ZNF143 motifs capable of recruiting Zinc-finger 143 (ZNF143) transcription factors. In some embodiments, the DSE comprises an OCT-1 element that comprises an octamer sequence which recruits the Oct-1 transcription factor. Modifications to any one of the DSE and PSE regions, or other parts of the promoter region, or combinatorial selection of different DSE and PSE regions can improve the rate and efficiency of transcription of the downstream payload. The distance between the DSE and PSE can be varied. In some embodiments, the distance between the DSE and PSE is shortened compared to the native promoter sequence. In some embodiments, the distance between the DSE and PSE is extended compared to the native promoter sequence. In some embodiments, the present disclosure provides promoters from the native human genome that have been adapted for use in a heterologous system where transcription of a therapeutic payload is desired. In some embodiments, the present disclosure provides promoters that have modifications in the DSE as compared to a native human genome DSE or a native mouse genome DSE, which are part of the enhancer region of the promoter. Regions of the DSE that are important for engineering include the SPH element (recruiting the transcription factor STAF) and the OCT-1 transcription factor (TF) binding sequence. In some embodiments, the SPH element comprises a zinc finger 143 (ZNF143) motif (recruits zinc fingers). In some embodiments, the SPH element is a ZNF143 element (e.g., a zinc finger 143 (ZNF143) motif (recruits zinc fingers)). These SPH regions (e.g., ZNF143 motifs) and OCT-1 TF binding regions can also be referred to as regulatory factors. Promoter sequences, as disclosed herein, that have optimal elements within the DSE can result in enhanced transcription of the downstream small RNA payload. In some embodiments, promoter sequences of the present disclosure have one or more regions within them corresponding to an SPH element (e.g., a ZNF143 motif) and an OCT-1 TF binding sequence.

### Sequence Elements

[0146] Engineering an expression cassette may comprise incorporating or replacing an engineered sequence element into an expression construct. In some embodiments elements present in the DSE or PSE in the promoter may be incorporated or replaced with engineered elements. In some embodiments, sequence elements present in the termination sequence may be incorporated or replaced with engineered elements. For example, an endogenous transcription factor binding sequence present in the DSE (e.g., an endogenous SPH element such as a ZNF143-binding sequence, an endogenous OCT-1-binding sequence, or an endogenous GABP-binding sequence) may be replaced with an engineered transcription factor binding sequence (e.g., an engineered SPH element such as a ZNF143-binding sequence, an engineered OCT-1-binding sequence, or an engineered GABP-binding sequence). Alternatively, or in addition, an endogenous core promoter sequence element (e.g., an endogenous proximal sequence element or an endogenous TATA box) may be replaced by an engineered core promoter sequence (e.g., an engineered proximal sequence element or an engineered TATA box). Alternatively, or in addition, an endogenous termination sequence elements (e.g., an endogenous 3′ box sequence element) may be replaced by an engineered termination sequence element (e.g., an engineered 3′box sequence element). Examples of engineered sequence elements that may be inserted or substituted into an expression cassette are provided in TABLE 1.

TABLE 1
Exemplary Engineered Sequence Elements

| Sequence | | |
|---|---|---|
| Element | SEQ ID NO: | Sequence |
| ZNF143 | SEQ ID NO: 24 | ACTACAATTCCCAGC |
| ZNF143 | SEQ ID NO: 25 | TTCCCAGCATGCCCCGCGC |
| ZNF143 | SEQ ID NO: 26 | TACCCACAATGCCCTGC |
| OCT-1 | SEQ ID NO: 27 | ATGCAAAT |
| OCT-1 | SEQ ID NO: 28 | ATGCAAATCAAGAGAAATGCAAAT |
| OCT-1 | SEQ ID NO: 29 | ATGCATATTCAGCAAGAGAACTGC |
| | | ATATTCAT |
| OCT-1 | SEQ ID NO: 30 | ATTTGCATCAAGAGAAATTTGCAT |
| PSE | SEQ ID NO: 31 | AAGTCACCATGAGTGTAAAGGG |
| PSE | SEQ ID NO: 32 | AGGTCACCGTAACTATAAAAGA |
| PSE | SEQ ID NO: 33 | ACTTGACCTAAGTGTAAAGTT |
| PSE | SEQ ID NO: 34 | AAGTTACCATTACCCGTTTAGG |
| PSE | SEQ ID NO: 35 | AAATCACCATAAACGTGAAATG |
| PSE | SEQ ID NO: 36 | AAGTGACCTTGCGTGTAAAGGG |
| PSE | SEQ ID NO: 37 | AATGATCCTATATTTAGAGTGG |
| 3′ box | SEQ ID NO: 38 | GTTYN₀₋₃AARRYAGA |
| 3′ box | SEQ ID NO: 39 | GTTTN₁₋₄AANARNAGA |
| 3′ box | SEQ ID NO: 40 | GTTTAATAAAAATAGA |
| 3′ box | SEQ ID NO: 41 | GTTTCAAAAACAGA |
| 3′ box | SEQ ID NO: 42 | GTTCAATGGCTGA |

[0147] In some embodiments, an expression cassette may comprise one or more of the engineered sequence elements provided in TABLE 1. For example, an expression cassette may comprise a DSE with an engineered SPH element (e.g., a ZNF143 element) comprising a zinc finger 143 motif of any of SEQ ID NO: 24-SEQ ID NO: 26 that binds a ZNF143 transcription factor, a DSE with an engineered OCT-1 transcription factor binding site of any of SEQ ID NO: 27-SEQ ID NO: 30 that binds an OCT-1 transcription factor, an engineered proximal sequence element (PSE) of any of SEQ ID NO: 31-SEQ ID NO: 37 that recruits SNAPc and phosphorylated RNA polymerase II transcriptional machinery, an engineered transcriptional termination sequence element (e.g., a 3′ box sequence element) of any of SEQ ID NO: 38-SEQ ID NO: 42 that promotes termination of transcription, or combinations thereof.

[0148] An engineered SPH element comprising a zinc finger 143 motif may have at least about 70%, at least about 75%, at least about 80%, at least about 83%, at least about 85%, at least about 87%, at least about 90%, at least about 93%, at least about 95%, at least about 97%, or about 100% sequence identity to any of SEQ ID NO: 24-SEQ ID NO: 26. In some embodiments, the SPH element comprising a engineered zinc finger 143 motif may replace an endogenous SPH element comprising a zinc finger 143 motif of SEQ ID NO: 20.

[0149] An engineered OCT-1 transcription factor binding site may have at least about 7000, at least about 75%, at least about 80%, at least about 83%, at least about 85%, at least about 87%, at least about 90%, at least about 93%, at least about 95%, at least about 97%, or about 100% sequence identity to any of SEQ ID NO: 27-SEQ ID NO: 30. In some embodiments, an engineered OCT-1 transcription factor binding site may replace an endogenous OCT-1 transcription factor binding site of SEQ ID NO: 21 in the distal sequence element (DSE).

[0150] Additional exemplary PSE sequences of the present disclosure are provided in TABLE 2.

TABLE 2
Additional Exemplary PSE Sequences

| SEQ ID NO | Sequence |
|---|---|
| SEQ ID NO: 67 | AAATCACCATAAACGTGAAATG |
| SEQ ID NO: 68 | AAGTGACCGTGTGTGTAAAGAG |
| SEQ ID NO: 69 | AAGTGACCATGTGTGTAAAGGG |
| SEQ ID NO: 70 | AAGTGACCGTGCGTGTAAGGGG |
| SEQ ID NO: 71 | AAGTGACCGTGTGTGTAAAGGG |
| SEQ ID NO: 72 | TCAGCACCATTTTTTGGATCTG |
| SEQ ID NO: 73 | ATCTTACTTTTATGATCAATGT |
| SEQ ID NO: 74 | AAGTGACCGTGTGTTGAGAGTG |
| SEQ ID NO: 75 | GGCAAACTATGTTAAGGGAAGT |
| SEQ ID NO: 76 | AAGTGACCTTGCGTGTAAAGGG |
| SEQ ID NO: 77 | AAGTGACCGTGCGTGTAAAGGG |
| SEQ ID NO: 78 | AATTTGCCATGAGTATGTTGTG |
| SEQ ID NO: 79 | AATGATCCTATATTTAGAGTGG |
| SEQ ID NO: 80 | GAAACTCCATCTTAAAAAAAAA |
| SEQ ID NO: 81 | TAGTTACCATAACTGGTTGGAA |
| SEQ ID NO: 82 | TTCTTACCGTGACCTCAGGATG |
| SEQ ID NO: 83 | TTCTCGCCATCAGTTAAAAGTT |
| SEQ ID NO: 84 | TACTCACCATCAGCATAATATG |
| SEQ ID NO: 85 | CACTCACCCTCAATGTAATGGT |
| SEQ ID NO: 86 | AACTCACCTTTGCGAAATAGGA |
| SEQ ID NO: 87 | TAATTACCACAACCCTACCAGG |
| SEQ ID NO: 88 | TAGACACCATCAGTGTACTAGG |
| SEQ ID NO: 89 | TAGTAACCATTGCTAATCTAGT |
| SEQ ID NO: 90 | AAGTTACCATTACCCGTTTAGG |
| SEQ ID NO: 91 | AAGGCACCGTAAGTAGAGGGAG |
| SEQ ID NO: 92 | TAGGCACCATCGGCGTACTAGG |
| SEQ ID NO: 93 | TAGTCACCATCACTATACTAGG |
| SEQ ID NO: 94 | AATTTACCATTAGCCTGTTGGG |
| SEQ ID NO: 95 | CAACAACCATAAGTGTGTTAAG |
| SEQ ID NO: 96 | AGCTCACCCTCATCAATTGTGG |
| SEQ ID NO: 97 | AACTCACCCTAGCTTGTAACGG |
| SEQ ID NO: 98 | TGTTCACCTTTACCAAAAAATG |
| SEQ ID NO: 99 | TAGTCATCATACGCCTAATGAG |
| SEQ ID NO: 100 | TAGTCACCCTATGTGTAAATTA |
| SEQ ID NO: 101 | TACTCACCCTCAGCTGAAAATG |
| SEQ ID NO: 102 | AAGTTACCCCGATGACTTGGTT |
| SEQ ID NO: 103 | AACTCACCATAACTAAGAGAAG |
| SEQ ID NO: 104 | TATAAACCATGCCCAAAGGCTT |
| SEQ ID NO: 105 | CTGTCACCCTGAGGTTAGGATG |
| SEQ ID NO: 106 | TTTAAACCTGCTGTTTTGAAGA |
| SEQ ID NO: 107 | TTCTCACCCTAATCATAAAACA |
| SEQ ID NO: 108 | ACTTGACCTAAGTGTAAAGTT |
| SEQ ID NO: 109 | TGCTTACCGTAACTTGAAAGTA |
| SEQ ID NO: 110 | AGTTATCCTAACCAAAAGATG |
| SEQ ID NO: 111 | AGGTTACCGTAAGGAAAACAAA |
| SEQ ID NO: 112 | CGGTCACCGTAAGTAGAATAGG |
| SEQ ID NO: 113 | AGTCGGCCTATGTGTACAGAC |
| SEQ ID NO: 114 | AAGTCACCCTCACCGAAAGGCG |
| SEQ ID NO: 115 | ATATCACTGTAAGGGGAAAATG |
| SEQ ID NO: 116 | ACTCATCCTAACTTATTTAGA |
| SEQ ID NO: 117 | AAGTCTCCTTACCTAGAAAAGA |
| SEQ ID NO: 118 | ACGCGACCATAACTCTAAAAGG |
| SEQ ID NO: 119 | AAGTCACCATGAGTGTAAAGGG |
| SEQ ID NO: 120 | AGGTCACCGTAACTATAAAAGA |

[0151] A PSE may have at least about 70%, at least about 75%, at least about 80%, at least about 83%, at least about 85%, at least about 87%, at least about 90%, at least about 93%, at least about 95%, at least about 97%, or about 100% sequence identity to any of SEQ ID NO: 31-SEQ ID NO: 37 or SEQ ID NO: 67-SEQ ID NO: 120. In some embodiments, the PSE may replace an endogenous PSE of SEQ ID NO: 22. In some embodiments, a PSE that may be included in an engineered promoter sequence may have at least about 70%, at least about 75%, at least about 80%, at least about 83%, at least about 85%, at least about 87%, at least about 90%, at least about 93%, at least about 95%, at least about 97%, or about 100% sequence identity to any of SEQ ID NO: 67-SEQ ID NO: 120. In some embodiments, the promoter sequence comprises a PSE sequence of SEQ ID NO: 31-SEQ ID NO: 37 or SEQ ID NO: 67-SEQ ID NO: 120. In some embodiments, the PSE is selected from SEQ ID NO: 31-SEQ ID NO: 37 or SEQ ID NO: 67-SEQ ID NO: 120. The PSE may be selected or engineered from the PSE of an endogenous gene. For example, the PSE may have at least about 70%, at least about 75%, at least about 80%, at least about 83%, at least about 85%, at least about 87%, at least about 90%, at least about 93%, at least about 95%, at least about 97%, or about 100% sequence identity to a PSE from a U1, U2, U4, U5, U6, U7, U3, SNORD13, SNORD118, RPPH1, TRNAU1, 7SK, RNY3, or RNY4 gene. In some embodiments, an engineered promoter may include a PSE (e.g., any of SEQ ID NO: 31-SEQ ID NO: 37 or SEQ ID NO: 67-SEQ ID NO: 120). In some embodiments, an engineered promoter may include a PSE (e.g., any of SEQ ID NO: 31-SEQ ID NO: 37 or SEQ ID NO: 67-SEQ ID NO: 120) in place of a PSE of SEQ ID NO: 22.

[0152] In some embodiments, an engineered promoter may comprise a duplicated sequence element (e.g., a duplicated transcription factor binding site) to enhance payload expression. For example, an engineered promoter may comprise a DSE with two or more SPH elements comprising zinc finger 143 motifs (e.g., two or more of SEQ ID NO: 20 or SEQ ID NO: 24-SEQ ID NO: 26, or combinations thereof). In another example, an engineered promoter may comprise a DSE with two or more OCT-1 transcription factor binding sites (e.g., two or more of SEQ ID NO: 21 or SEQ ID NO: 27-SEQ ID NO: 30, or combinations thereof). In another example, an engineered promoter may comprise two or more proximal sequence elements (PSEs) (e.g., two or more of SEQ ID NO: 22, SEQ ID NO: 31-SEQ ID NO: 37, SEQ ID NO: 67-SEQ ID NO: 120, or combinations thereof). Duplicated sequences may be separated by a spacer sequence.

[0153] In some embodiments, an engineered promoter may comprise multiple promoter elements (e.g., a SPH element comprising a zinc finger 143 motif, an OCT-1 transcription factor binding site, or a proximal sequence element). In some embodiments, an engineered promoter may comprise one or more of an SPH element comprising a engineered zinc finger 143 motif of any of SEQ ID NO: 24-SEQ ID NO: 26 that binds a ZNF143 transcription factor, one or more of an engineered OCT-1 transcription factor binding site of any of SEQ ID NO: 27-SEQ ID NO: 30 that binds an OCT-1 transcription factor, or one or more of an engineered proximal sequence element (PSE) of any of SEQ ID NO: 31-SEQ ID NO: 37, SEQ ID NO: 67-SEQ ID NO: 120. An engineered promoter may also comprise an endogenous SPH element comprising a zinc finger 143 motif of SEQ ID NO: 20, an endogenous OCT-1 transcription factor binding site of SEQ ID NO: 21, or an endogenous proximal sequence element (PSE) of SEQ ID NO: 22.

[0154] An engineered transcriptional termination sequence may comprise a 3′ box sequence element. A 3′ box element may have at least about 70%, at least about 75%, at least about 80%, at least about 83%, at least about 85%, at least about 87%, at least about 90%, at least about 93%, at least about 95%, at least about 97%, or about 100% sequence identity to any of SEQ ID NO: 40-SEQ ID NO: 42. In some embodiments, a 3′ box sequence element may comprise a sequence of GTTYN₀₋₃AARRYAGA (SEQ ID NO: 38), wherein each N is independently A, T, C, or G, each R is independently A or G, and each Y is independently C or T. In some embodiments, a 3′ box element may comprise a sequence of GTTTN₁₋₄AANARNAGA (SEQ ID NO: 39), wherein each N is independently A, T, C, or G, and each R is independently A or G. In some embodiments, the engineered transcriptional termination sequence may replace an endogenous 3′ box sequence element of SEQ ID NO: 23.

[0155] Additional exemplary 3′ box sequence elements that may be included in an engineered termination sequence of the present disclosure are provided in TABLE 3.

TABLE 3
Additional Exemplary 3′ Box Sequence Elements

| SEQ ID NO | Sequence |
|---|---|
| SEQ ID NO: 121 | GTTCAATGGCTGA |
| SEQ ID NO: 122 | GTTTCAAAAACAGA |
| SEQ ID NO: 123 | GTTTCTAAAAGTAGA |
| SEQ ID NO: 124 | ATGAAAAAATAGA |
| SEQ ID NO: 125 | CTGGAAAACGCAGA |
| SEQ ID NO: 126 | GTTTAAAGAATAGT |
| SEQ ID NO: 127 | GTTTGATGTTAGA |
| SEQ ID NO: 128 | GTTGAAAGGTAGC |
| SEQ ID NO: 129 | GTGTAAAAAGCAGT |
| SEQ ID NO: 130 | GTTTTAAAAATAGG |
| SEQ ID NO: 131 | GTGGAAAGATAGA |
| SEQ ID NO: 132 | GTGCGAATAGTAGG |
| SEQ ID NO: 133 | GTTTTAAAAGTGGA |
| SEQ ID NO: 134 | GTTTAAAAGACGG |
| SEQ ID NO: 135 | GTTTATAAAAGGC |
| SEQ ID NO: 136 | ATTAAAAGAAATA |
| SEQ ID NO: 137 | GTTTAATGGAAGA |
| SEQ ID NO: 138 | TTTACAAAGAACAGA |
| SEQ ID NO: 139 | GCTCAATGACAGA |
| SEQ ID NO: 140 | TCTAGAGAAGGCAGT |
| SEQ ID NO: 141 | ATGTTAATAGTAGT |
| SEQ ID NO: 142 | GTCTAAAGAAAAGG |
| SEQ ID NO: 143 | GTTGAACAACAGA |
| SEQ ID NO: 144 | GTTCAAACAGCAGT |
| SEQ ID NO: 145 | ATCCAACAATAGA |
| SEQ ID NO: 146 | GTTTAAAAATCAGA |
| SEQ ID NO: 147 | GTTTTAAAAACAGA |
| SEQ ID NO: 148 | GTTACTAAAGAGAGA |
| SEQ ID NO: 149 | GTTTTATAAAAAAAGA |
| SEQ ID NO: 150 | GTTAAAAAATCAGA |
| SEQ ID NO: 151 | GTTTTAAAAGTAGA |
| SEQ ID NO: 152 | ATTAAAAGTTAGG |
| SEQ ID NO: 153 | GTTGCCAATGATAGA |
| SEQ ID NO: 154 | GCTGATTAGCAGA |
| SEQ ID NO: 155 | GTTAGGCGAAATATT |
| SEQ ID NO: 156 | GTAACTGAAAAGAGA |
| SEQ ID NO: 157 | GCCTAAAAAGTAGA |
| SEQ ID NO: 158 | CTTCAAGGATCGA |
| SEQ ID NO: 159 | GCTGCAAGGTCAGG |
| SEQ ID NO: 160 | GTTCAAGAGCAGT |
| SEQ ID NO: 161 | AAGAAAAAGAAGA |
| SEQ ID NO: 162 | GACCAAAGGCAGG |
| SEQ ID NO: 163 | CTTCAAACAAAGG |
| SEQ ID NO: 164 | GTCGCTAACGGGAGA |
| SEQ ID NO: 165 | TTTTTAGATTAATAGA |
| SEQ ID NO: 166 | GTTTAATAAAAATAGA |

[0156] An engineered 3′ box sequence element may have at least about 7000, at least about 75%, at least about 80%, at least about 83%, at least about 85%, at least about 87%, at least about 90%, at least about 93%, at least about 95%, at least about 97%, or about 100% sequence identity to any of SEQ ID NO: 40-SEQ ID NO: 42 or SEQ ID NO: 121-SEQ ID NO: 166. In some embodiments, the engineered transcriptional termination sequence may replace an endogenous 3′ box sequence element of SEQ ID NO: 23. In some embodiments, a 3′ box sequence element that may be included in an engineered promoter sequence may have at least about 70%, at least about 75%, at least about 80%, at least about 83%, at least about 85%, at least about 87%, at least about 90%, at least about 93%, at least about 95%, at least about 97%, or about 100% sequence identity to any of SEQ ID NO: 121-SEQ ID NO: 166. In some embodiments, the termination sequence comprises a 3′ box sequence element sequence of SEQ ID NO: 40-SEQ ID NO: 42 or SEQ ID NO: 121-SEQ ID NO: 166. In some embodiments, the 3′ box sequence element is selected from SEQ ID NO: 40-SEQ ID NO: 42 or SEQ ID NO: 121-SEQ ID NO: 166. The 3′ box sequence element may be selected or engineered from the 3′ box sequence element of an endogenous gene. For example, the 3′ box sequence element may have at least about 70%, at least about 75%, at least about 80%, at least about 83%, at least about 85%, at least about 87%, at least about 90%, at least about 93%, at least about 95%, at least about 97%, or about 100% sequence identity to a 3′ box sequence element from a U1, U2, U4, U5, U6, U7, U3, SNORD13, SNORD118, RPPH1, TRNAU1, 7SK, RNY3, or RNY4 gene. In some embodiments, an engineered termination sequence may include a 3′ box sequence element (e.g., any of SEQ ID NO: 40-SEQ ID NO: 42 or SEQ ID NO: 121-SEQ ID NO: 166). In some embodiments, an engineered termination sequence may include a 3′ box sequence element (e.g., any of SEQ ID NO: 40-SEQ ID NO: 42 or SEQ ID NO: 121-SEQ ID NO: 166) in place of a 3′ box sequence element of SEQ ID NO: 23.

### Promoters

[0157] An expression cassette may comprise a promoter. A promoter may be an endogenous promoter. A promoter may be an engineered promoter engineered to increase expression of an RNA payload sequence under transcriptional control of the promoter. Examples of endogenous promoters (e.g., SEQ ID NO: 13-SEQ ID NO: 15), engineered promoters (e.g., SEQ ID NO: 16, SEQ ID NO: 17, SEQ ID NO: 1241, SEQ ID NO: 1248, SEQ ID NO: 1249, SEQ ID NO: 1252, SEQ ID NO: 1253, and SEQ ID NO: 1258-SEQ ID NO: 1261), and additional promoters (e.g., SEQ ID NO: 1250, SEQ ID NO: 1251, SEQ ID NO: 1262, and SEQ ID NO: 1263) are provided in TABLE 4.

TABLE 4
Exemplary Promoter Sequences

| SEQ ID NO: | Sequence |
|---|---|
| SEQ ID NO: 13 | TAAGGACCAGCTTCTTTGGGAGAGAACAGACGCAGGGGGGGGAGGG |
| | AAAAAGGGAGAGGCAGACGTCACTTCCTCTTGGCGACTCTGGCAGCA |
| | GATTGGTCGGTTGAGTGGCAGAAAGGCAGACGGGGACTGGGCAAGG |
| | CACTGTCGGTGACATCACGGACAGGGCGACTTCTATGTAGATGAGGC |
| | AGCGCAGAGGCTGCTGCTTCGCCACTTGCTGCTTCGCCACGAAGGGA |
| | GTTCCCGTGCCCTGGGAGCGGGTTCAGGACCGCTGATCGGAAGTGAG |
| | AATCCCAGCTGTGTGTCAGGGCTGGAAAGGGCTCGGGAGTGCGCGGG |
| | GCAAGTGACCGTGTGTGTAAAGAGTGAGGCGTATGAGGCTGTGTCGG |
| | GGCAGAGCCCGAAGATCTC |
| SEQ ID NO: 14 | TTAACAACAACGAAGGGGCTGTGACTGGCTGCTTTCTCAACCAATCA |
| | GCACCGAACTCATTTGCATGGGCTGAGAACAAATGTTCGCGAACTCT |
| | AGAAATGAATGACTTAAGTAAGTTCCTTAGAATATTATTTTTCCTACT |
| | GAAAGTTACCACATGCGTCGTTGTTTATACAGTAATAGGAACAAGAA |
| | AAAAGTCACCTAAGCTCACCCTCATCAATTGTGGAGTTCCTTTATATC |
| | CCATCTTCTCTCCAAACACATACGCA |
| SEQ ID NO: 15 | TAACAACATAGGAGCTGTGATTGGCTGTTTTCAGCCAATCAGCACTGA |
| | CTCATTTGCATAGCCTTTACAAGCGGTCACAAACTCAAGAAACGAGC |
| | GGTTTTAATAGTCTTTTAGAATATTGTTTATCGAACCGAATAAGGAAC |
| | TGTGCTTTGTGATTCACATATCAGTGGAGGGGTGTGGAAATGGCACCT |
| | TGATCTCACCCTCATCGAAAGTGGAGTTGATGTCCTTCCCTGGCTCGC |
| | TACAGACGCACTTCCGC |
| SEQ ID NO: 16 | TAACAACATAGGAGCTGTGATTGGCTGTTTTCAGCCAATCAGCACTGA |
| | CTCATTTGCATAGCCTTTACAAGCGGTCACAAACTCAAGAAACGAGC |
| | GGTTTTAATAGTCTTTTAGAATATTGTTTATCGAACCGAATAAGGAAC |
| | TGTGCTTTGTGATTCACATATCAGTGGAGGGGTGTGGAAATGGCACCT |
| | TGATAAGTCACCATGAGTGTAAAGGGAGTTGATGTCCTTCCCTGGCTC |
| | GCTACAGACGCACTTCCGC |
| SEQ ID NO: 17 | TAACAACATAGGAGCTGTGATTGGCTGTTTTCAGCCAATCAGCACTGA |
| | CTCATGCAAATCAAGAGAAATGCAAATAGCCTTTACAAGCGGTCACA |
| | AACTCAAGAAACGAGCGGTTTTAATAGTCTTTTAGAATATTGTTTATC |
| | GAACCGAATAAGGAACTGTGCTTTGTGATTCACATATCAGTGGAGGG |
| | GTGTGGAAATGGCACCTTGATAAGTCACCATGAGTGTAAAGGGAGTT |
| | GATGTCCTTCCCTGGCTCGCTACAGACGCACTTCCGC |
| SEQ ID NO: | TAAGGACCAGCTTCTTTGGGAGAGAACAGACGCAGGGGGGGGAGGG |
| 1241 | AAAAAGGGAGAGGCAGACGTCACTTCCTCTTGGCGACTCTGGCAGCA |
| | GATTGGTCGGTTGAGTGGCAGAAAGGCAGACGGGGACTGGGCAAGG |
| | CACTGTCGGTGACATCACGGACAGGGCGACTTCTATGCAAATCAAGA |
| | GAAATGCAAATGAGGCAGCGCAGAGGCTGCTGCTTCGCCACTTGCTG |
| | CTTCGCCACGAAGGGAGTTCCCGTGCCCTGGGAGCGGGTTCAGGACC |
| | GCTGATCGGAAGTGAGAATCCCAGCTGTGTGTCAGGGCTGGAAAGGG |
| | CTCGGGAGTGCGCGGGGCAAAAGTCACCATGAGTGTAAAGGGTGAGG |
| | CGTATGAGGCTGTGTCGGGGCAGAGCCCGAAGATCTC |
| SEQ ID NO: | TAACAACATAGGAGCTGTGATTGGCTGTTTTCAGCCAATCAGCACTGA |
| 1248 | CTCATTTGCATAGCCTTTACAAGCGGTCATGGAAATGGCACCTTGATC |
| | TCACCCTCATCGAAAGTGGAGTTGATGTCCTTCCCTGGCTCGCTACAG |
| | ACGCACTTCCGC |
| SEQ ID NO: | TAACAACATAGGAGCTGTGATTGGCTGTTTTCAGCCAATCAGCACTGA |
| 1249 | CTCATGCAAATCAAGAGAAATGCAAATAGCCTTTACAAGCGGTCATG |
| | GAAATGGCACCTTGATAAGTCACCATGAGTGTAAAGGGAGTTGATGT |
| | CCTTCCCTGGCTCGCTACAGACGCACTTCCGC |
| SEQ ID NO: | TCGCCCCCTAACGGTGACATAAGGCACTCTGTGAAATGCTCTGTTCCG |
| 1250 | GAATCAAAAGATTGATCCGATTATTTGCATACCCATAATGCACTGCTC |
| | ACAGTACAAATTTAAAAAGGCAAAATCAAACATTTTTATTCTAAGCAT |
| | ATTCTGTGAAAGTTAGACTTTTGTTTAAACAATACTCTTAAAATTTTTT |
| | TCTAGGTATAGAACCTTGGCATTCACTAGTCACCATCACTATACTAGG |
| | AGTTTCTGTTACCCGAGAAACGAGTTATGAAATTAACAAGC |
| SEQ ID NO: | GTGGCCTCAGGCGCAGCGCTAAAACGCATGAACCATTTAAGGTATTT |
| 1251 | CCTGAAACTGGAGCGTGATTGGTGAGACTTTATTTGCATACCCACAAT |
| | GCATTGCGCACTAAATAATGTTCGTCTTTAAAATTATTTCCCCTTTTTC |
| | CTTCAACATATCTTTCTCGGAACCGAGATTGCTGTCCCAGAATTGTCT |
| | GAAGAAAAAGGCTGAAGTCAATAGCTCTTTTGGGCCGAAGGAAAGTT |
| | ACCATTACCCGTTTAGGAGTAGCCGTTACCTGAGAACTGTAGTGTCGA |
| | CGACTGATGTTAT |
| SEQ ID NO: | GTGGCCTCAGGCGCAGCGCTAAAACGCATGAACCATTTAAGGTATTT |
| 1252 | CCTGAAACTGGAGCGTGATTGGTGAGACTTTATGCAAATCAAGAGAA |
| | ATGCAAATACCCACAATGCATTGCGCACTAAATAATGTTCGTCTTTAA |
| | AATTATTTCCCCTTTTTCCTTCAACATATCTTTCTCGGAACCGAGATTG |
| | CTGTCCCAGAATTGTCTGAAGAAAAAGGCTGAAGTCAATAGCTCTTTT |
| | GGGCCGAAGGAAAGTCACCATGAGTGTAAAGGGAGTAGCCGTTACCT |
| | GAGAACTGTAGTGTCGACGACTGATGTTAT |
| SEQ ID NO: | GTCAAGTGCCTCTCTCCATTTACTGGTAAGAGAGAGAGGGTTTAGAG |
| 1253 | GAACTCTTGTTCCGGCGCTCAGCTCATGCAAATCAAGAGAAATGCAA |
| | ATCCCAGAATGCATTGTAGATACGAGAATTATTACCAGGGTTATCTGT |
| | TTGAATAATAATATTTAAACTTTTTTTCTTTGTCAGGAGATTTTACCCA |
| | GTGAGAACATGTTTAGGACACTTTTCTACAGTGGAAGAAAAGCTTCTG |
| | TCTGCAGGTCCATTCTCGCCATCAGTTAAAAGTTACCAGTCAATAGCT |
| | GGGAAGCCAGGCAAAAGGCTAACAGGCAG |
| SEQ ID NO: | TAACAACATAGGAGCTGTGATTGGCTGTTTTCAGCCAATCAGCACTGA |
| 1258 | CTCATTTGCATAGCCTTTACAAGCGGTCACAAACTCAAGAAACGAGC |
| | GGTTTTATGATTCACATATCAGTGGAGGGGTGTGGAAATGGCACCTTG |
| | ATCTCACCCTCATCGAAAGTGGAGTTGATGTCCTTCCCTGGCTCGCTA |
| | CAGACGCACTTCCGC |
| SEQ ID NO: | TAACAACATAGGAGCTGTGATTGGCTGTTTTCAGCCAATCAGCACTGA |
| 1259 | CTCATTTGCATAGCCTTTACAAGCGGTCACAAACTCAAGAAAAGTGG |
| | AGGGGTGTGGAAATGGCACCTTGATCTCACCCTCATCGAAAGTGGAG |
| | TTGATGTCCTTCCCTGGCTCGCTACAGACGCACTTCCGC |
| SEQ ID NO: | TAACAACATAGGAGCTGTGATTGGCTGTTTTCAGCCAATCAGCACTGA |
| 1260 | CTCATTTGCATAGCCTTTGATCTCACCCTCATCGAAAGTGGAGTTGAT |
| | GTCCTTCCCTGGCTCGCTACAGACGCACTTCCGC |
| SEQ ID NO: | TAACAACATAGGAGCTGTGATTGGCTGTTTTCAGCCAATCAGCACTGA |
| 1261 | CTCATTTGCATACTCACCCTCATCGAAAGTGGAGTTGATGTCCTTCCC |
| | TGGCTCGCTACAGACGCACTTCCGC |
| SEQ ID NO: | ATTTAATAGCAGTCTTTATTTAAAAGAAATCAAACTCAGACGTACAAA |
| 1262 | TACACAAAACAGATAAAACCCGAGTCTCTGACCAGGAAAGCGTTATT |
| | TTCCAGCCAGCCAGTCTTCGGCTTCGCCCCCTAACGGTGACATAAGGC |
| | ACTCTGTGAAATGCTCTGTTCCGGAATCAAAAGATTGATCCGATTATT |
| | TGCATACCCATAATGCACTGCTCACAGTACAAATTTAAAAAGGCAAA |
| | ATCAAACATTTTTATTCTAAGCATATTCTGTGAAAGTTAGACTTTTGTT |
| | TAAACAATACTCTTAAAATTTTTTTCTAGGTATAGAACCTTGGCATTC |
| | ACTAGTCACCATCACTATACTAGGAGTTTCTGTTACCCGAGAAACGAG |
| | TTATGAAATTAACAAGC |
| SEQ ID NO: | CAATTACTTTTGCACCGATCTAATAGCTCGCCCACTGTAAGTAAAGCA |
| 1263 | GGTAAAGTCAGCCTTTTTCTTCTGGGACCAGACTCTGCTCTGCCCCGC |
| | GGTGGTGGCCTCAGGCGCAGCGCTAAAACGCATGAACCATTTAAGGT |
| | ATTTCCTGAAACTGGAGCGTGATTGGTGAGACTTTATTTGCATACCCA |
| | CAATGCATTGCGCACTAAATAATGTTCGTCTTTAAAATTATTTCCCCTT |
| | TTTCCTTCAACATATCTTTCTCGGAACCGAGATTGCTGTCCCAGAATT |
| | GTCTGAAGAAAAAGGCTGAAGTCAATAGCTCTTTTGGGCCGAAGGAA |
| | AGTTACCATTACCCGTTTAGGAGTAGCCGTTACCTGAGAACTGTAGTG |
| | TCGACGACTGATGTTAT |

[0158] In some embodiments, a promoter for enhanced expression of an RNA payload may have at least about 70%, at least about 75%, at least about 80%, at least about 83%, at least about 85%, at least about 87%, at least about 90%, at least about 91%, at least about 92%, at least about 93%, at least about 94%, at least about 95%, at least about 96% at least about 97%, at least about 98%, at least about 99%, or about 100% sequence identity to any of SEQ ID NO: 13-SEQ ID NO: 17, SEQ ID NO: 1241, SEQ ID NO: 1248-SEQ ID NO: 1253, or SEQ ID NO: 1259-SEQ ID NO: 1263. In some embodiments, an engineered promoter for enhanced expression of an RNA payload may be a variant of a promoter (e.g., a variant of any one of SEQ ID NO: 13-SEQ ID NO: 15, SEQ ID NO: 1250, SEQ ID NO: 1251, SEQ ID NO: 1262, and SEQ ID NO: 1263). In some embodiments, an engineered promoter may comprise a variant of any of SEQ ID NO: 13-SEQ ID NO: 15, SEQ ID NO: 1250, SEQ ID NO: 1251, SEQ ID NO: 1262, and SEQ ID NO: 1263 having at least about 70%, at least about 75%, at least about 80%, at least about 83%, at least about 85%, at least about 87%, at least about 90%, at least about 91%, at least about 92%, at least about 93%, at least about 94%, at least about 95%, at least about 96% at least about 97%, at least about 98%, at least about 99%, or about 100% sequence identity to any of SEQ ID NO: 13-SEQ ID NO: 15, SEQ ID NO: 1250, SEQ ID NO: 1251, SEQ ID NO: 1262, and SEQ ID NO: 1263 and at least one nucleotide substitution relative to any of SEQ ID NO: 13-SEQ ID NO: 15, SEQ ID NO: 1250, SEQ ID NO: 1251, SEQ ID NO: 1262, and SEQ ID NO: 1263.

[0159] In some embodiments, a promoter for enhanced expression of an RNA payload may have at least about 70%, at least about 75%, at least about 80%, at least about 83%, at least about 85%, at least about 87%, at least about 90%, at least about 91%, at least about 92%, at least about 93%, at least about 94%, at least about 95%, at least about 96% at least about 97%, at least about 98%, at least about 99%, or about 100% sequence identity to SEQ ID NO: 13. In some embodiments, a promoter for enhanced expression of an RNA payload may have at least about 70%, at least about 75%, at least about 80%, at least about 83%, at least about 85%, at least about 87%, at least about 90%, at least about 91%, at least about 92%, at least about 93%, at least about 94%, at least about 95%, at least about 96% at least about 97%, at least about 98%, at least about 99%, or about 100% sequence identity to SEQ ID NO: 15. In some embodiments, a promoter for enhanced expression of an RNA payload may have at least about 70%, at least about 75%, at least about 80%, at least about 83%, at least about 85%, at least about 87%, at least about 90%, at least about 91%, at least about 92%, at least about 93%, at least about 94%, at least about 95%, at least about 96% at least about 97%, at least about 98%, at least about 99%, or about 100% sequence identity to SEQ ID NO: 17. In some embodiments, a promoter for enhanced expression of an RNA payload may have at least about 70%, at least about 75%, at least about 80%, at least about 83%, at least about 85%, at least about 87%, at least about 90%, at least about 91%, at least about 92%, at least about 93%, at least about 94%, at least about 95%, at least about 96% at least about 97%, at least about 98%, at least about 99%, or about 100% sequence identity to SEQ ID NO: 1241. In some embodiments, a promoter for enhanced expression of an RNA payload may have at least about 70%, at least about 75%, at least about 80%, at least about 83%, at least about 85%, at least about 87%, at least about 90%, at least about 91%, at least about 92%, at least about 93%, at least about 94%, at least about 95%, at least about 96% at least about 97%, at least about 98%, at least about 99%, or about 100% sequence identity to SEQ ID NO: 1250. In some embodiments, a promoter for enhanced expression of an RNA payload may have at least about 70%, at least about 75%, at least about 80%, at least about 83%, at least about 85%, at least about 87%, at least about 90%, at least about 91%, at least about 92%, at least about 93%, at least about 94%, at least about 95%, at least about 96% at least about 97%, at least about 98%, at least about 99%, or about 100% sequence identity to SEQ ID NO: 1251. In some embodiments, a promoter for enhanced expression of an RNA payload may have at least about 70%, at least about 75%, at least about 80%, at least about 83%, at least about 85%, at least about 87%, at least about 90%, at least about 91%, at least about 92%, at least about 93%, at least about 94%, at least about 95%, at least about 96% at least about 97%, at least about 98%, at least about 99%, or about 100% sequence identity to SEQ ID NO: 1252. In some embodiments, a promoter for enhanced expression of an RNA payload may have at least about 70%, at least about 75%, at least about 80%, at least about 83%, at least about 85%, at least about 87%, at least about 90%, at least about 91%, at least about 92%, at least about 93%, at least about 94%, at least about 95%, at least about 96% at least about 97%, at least about 98%, at least about 99%, or about 100% sequence identity to SEQ ID NO: 1253. In some embodiments, a promoter for enhanced expression of an RNA payload may have at least about 70%, at least about 75%, at least about 80%, at least about 83%, at least about 85%, at least about 87%, at least about 90%, at least about 91%, at least about 92%, at least about 93%, at least about 94%, at least about 95%, at least about 96% at least about 97%, at least about 98%, at least about 99%, or about 100% sequence identity to SEQ ID NO: 1262. In some embodiments, a promoter for enhanced expression of an RNA payload may have at least about 70%, at least about 75%, at least about 80%, at least about 83%, at least about 85%, at least about 87%, at least about 90%, at least about 91%, at least about 92%, at least about 93%, at least about 94%, at least about 95%, at least about 96% at least about 97%, at least about 98%, at least about 99%, or about 100% sequence identity to SEQ ID NO: 1263.

[0160] An engineered promoter may enhance expression of an RNA payload under control of the engineered promoter relative to an endogenous promoter (e.g., an endogenous U1 promoter, an endogenous U6 promoter, or an endogenous U7 promoter). In some embodiments, the engineered promoter (e.g., a promoter comprising a sequence of any one of SEQ ID NO: 16, SEQ ID NO: 17, SEQ ID NO: 1241, SEQ ID NO: 1248, SEQ ID NO: 1249, SEQ ID NO: 1252, SEQ ID NO: 1253, or SEQ ID NO: 1258-SEQ ID NO: 1261) may increase expression of an RNA payload by at least about 5%, at least about 10%, at least about 15%, at least about 20%, at least about 25%, at least about 30%, at least about 35%, at least about 40%, at least about 45%, or at least about 50% relative to an endogenous promoter (e.g., an endogenous U1 promoter, an endogenous U6 promoter, or an endogenous U7 promoter). In some embodiments, the engineered promoter (e.g., a promoter comprising a sequence of any one of SEQ ID NO: 16, SEQ ID NO: 17, SEQ ID NO: 1241, SEQ ID NO: 1248, SEQ ID NO: 1249, SEQ ID NO: 1252, SEQ ID NO: 1253, and SEQ ID NO: 1258-SEQ ID NO: 1261) may increase expression of an RNA payload by from about 5% to about 50%, from about 10% to about 50%, from about 15% to about 50%, from about 20% to about 50%, from about 25% to about 50%, from about 30% to about 50%, from about 35% to about 50%, from about 40% to about 50%, from about 45% to about 50%, from about 5% to about 40%, from about 10% to about 40%, from about 15% to about 40%, from about 20% to about 40%, from about 25% to about 40%, from about 30% to about 40%, from about 35% to about 40%, from about 5% to about 30%, from about 10% to about 30%, from about 15% to about 30%, from about 20% to about 30%, from about 5% to about 30%, from about 10% to about 20%, or from about 15% to about 20% relative to an endogenous promoter (e.g., an endogenous U1 promoter, an endogenous U6 promoter, or an endogenous U7 promoter).

[0161] In some embodiments, a promoter sequence may enhance transcription of an RNA payload. The promoter sequence may be positioned upstream of the payload sequence. Additional exemplary promoter sequences of the present disclosure are provided in TABLE 5.

TABLE 5
Additional Exemplary Promoter Sequences

| SEQ ID NO | Sequence |
|---|---|
| SEQ ID NO: 167 | AATTGTACCATAAAAGAATCTTGAGGATATCTTTAAAAGGTCTGCTCTCTTACGAAGGTGAA |
| | GTGTCTCCCCTGTAAGCTTGTTTACACCGGCATCTGTTCAGCCAGCCCTTTTTCATAGACACT |
| | TCAGCCAAATACTGGCGTGTTTTCCGTTTCTGTGTTTACGGTTGGACTCAACGAGCCTTTTAC |
| | TATTGTGGCATATGGGAGGGAGCGTTGCCATTCTGCTGCCAGGGGTGAGTGTGATCTGGTG |
| | GCTGTTACATTGTGTATATGCGAGTAGGTCTCTATCAAGAAGGGACCCGCC |
| SEQ ID NO: 168 | TGGTGGCCTCAGGCGCAGCGCTAAAACGCATGAACCATTTAAGGTATTTCCTGAAACTGGA |
| | GCGTGATTGGTGAGACTTTATTTGCATACCCACAATGCATTGCGCACTAAATAATGTTCGTC |
| | TTTAAAATTATTTCCCCTTTTTCCTTCAACATATCTTTCTCGGAACCGAGATTGCTGTCCCAG |
| | AATTGTCTGAAGAAAAAGGCTGAAGTCAATAGCTCTTTTGGGCCGAAGGAAAGTTACCATT |
| | ACCCGTTTAGGAGTAGCCGTTACCTGAGAACTGTAGTGTCGACGACTGATGTT |
| SEQ ID NO: 169 | AGATTGGTCGGTTGAGTGGCAGAAAGGCAGACGGGGACTGGGCAAGGCACTGTCGGTGAC |
| | ATCACGGACAGGGCGACTTCTATGTAGATGAGGCAGCGCAGAGGCTGCTGCTTCGCCACTT |
| | GCTGCTTCGCCACGAAGGAGTTCCCGTGCCCTGGGAGCGGGTTCAGGACCGCGGATCGGAA |
| | GTGAGAATCCCAGCTGTGTGTCAGGGCTGGAAAGGGCTCGGGAGTGCGCGGGGCAAGTGA |
| | CCGTGTGTGTAAAGAGTGAGGCGTATGAGGCTGTGTCGGGGCAGAGCCCGAAGATCTC |
| SEQ ID NO: 170 | TCGGAAGAACCCCGAGTCCATTGTAAGCTCAGGGGAGAGCGGGAGCCAGGGAGGTGAAGT |
| | GCGCAGACTCGGCAGCGGCGGCGGGCAGAACCGCGGGGGGGTGAGAGGGCGCGGTGGCTG |
| | CGGGGCGGGAGCCGCTGCTGAGAGGCGGCCTGGGTTGTCTTGTGGGGTGACTGTCGGTGGA |
| | ATCTTTGGTGGAGAGTGGTTTGGAAGAATGGCGAGGGGCGGCAGTGGGGAGGGTGGTGAC |
| | CCTGAGCGACCGGCCAGGGCGAGGAGGCTGTGCTGTCCCTGCAGGCCATGTGCTCATTT |
| SEQ ID NO: 171 | AGATTGGTCAGTTGAGTGGCAGAAAAGCAGACGGGGACTGGGCAAGGCACTGTCGGTGAC |
| | ATCACGGACAGGGCGACTTCTATGTAGATGAGGCAGCGCAGAGGCTGCTGCTTCGCCACTT |
| | GCTGCTTCGCCACGAAGGAGTTCCCCTGCCCTGGGAGCGGGTTCAGGACCGCGGATCGGAA |
| | GAGAGAATCCCAGCTGTGTGTCAGGGCTGGAAAGGGCTCGGGAGTGCGCGGGGCAAGTGA |
| | CCGTGTGTGTAAAGAGTGAGGCGTATGAGGCTGTGTCGGGGCAGAGCCCGAAGATCTC |
| SEQ ID NO: 172 | AGCACTTTGAGACGCTGAGGTGGGTGGATCACCTGAGGTCAAGAGTTCAAGACCAGCCTGG |
| | CCAACATGGTGAAGCCTCATCTCTACCAAAAATACAAAAAAATTAGCCAGGCATGGTAGTG |
| | GGCACCTGTAATCCCAGCTATTCGGGAGGCTGAAGCAGGAGAATTGCTTGAACCCAGGAGG |
| | TGGAGGTTGCAGTGAGCCAAGATCGCACCACTGCACTCCAGCCTGGGCGACAGAGCAAGAC |
| | TCTGTCTCAAAACAAAACAAAATAAAACAAAACAAAAACAAACAGAAAAGCTAAGA |
| SEQ ID NO: 173 | TCCTTTCCAGGGTGGACTCCACTCCCACTCTCACAAAAACATGTAGTAGGCCCTGGGCATTC |
| | AGCTCTTCCACACACTGCATGGCTTCCTGTTCCAACAGCAAAGAAAGGTTTACTCCAAAATC |
| | TGAATAGTGTTACCAGAATGTTAAGATAACTTTAAAATCTTTTACTTACAACAGAATCAGTA |
| | GAAACTTCCATGAACAGGACAGTTTTCAAATATAAGTTTATATTTGTTTAACATAATTTATA |
| | GCTCAGTAAATTACAGGCTGATATGGGCAATATTAAAAGTCATACAAAAAAA |
| SEQ ID NO: 174 | GTTCCTCCCTCGCTCGCGCAGCCGCTCTTCCCCGCCACTCCCTCGGTGCCCGCCAGCACATTC |
| | CCAGCAAGCCCTGAGTATATTTGCATATCAACTCACTACATTTTTTTCTTCTAACTAAAAAAT |
| | CGAAAGGACAAATTCCAGATTCTCCTTGTGAAGTCTTCCTTTCAGTTCAGAAGAAATGGAAT |
| | TCGCTCTTCAACTTCAGGAAGTTGAAATAAAGAGTTGCTTGGATTTTGTGTTCACCTTTACC |
| | AAAAAATGGATTTGGTAACACTGCCACCCTGCTTTGGTGACAGAGAAAGC |
| SEQ ID NO: 175 | AAGATCATAGGATAGGCCACAAACAAGTCTCAATAAATGTAAAAAAGTTAAAATCCTACAA |
| | ATTATGTTCTCTCACCACAACAGAATTAAATTAGAATTAACTTTAGAAAGAAATATAGGAA |
| | ATCCCCAAATATTTGGAAATAAGTTATTTCAAAAGAACCCATGGTCAAAGAAGAAATCAAA |
| | CCAAAAAAATTAGACAATATCTTAAAATTAATGGTAACAAAAAATAACATCAAAACTCATG |
| | AAATAGGGCAAAGTCAGTGGGAAGATGGAAATTTACACCTTTAAAAGCTTGTATTA |
| SEQ ID NO: 176 | CCCCCTTTGCCTTTTTTTTTTTGAGATGGAGTCTGGCTCTATTGCCCAGGCTTGAGTGCAGTG |
| | GCACCATCCTGCCTCACTGCAACCTCTGCCTCCTGGGTTCAAGCGATTCTCCTGCCTCAGCCT |
| | CCCAAGTAGCTGGGACTACAGACACCTACAACCACACCAGCTAATTTTTGTATTTTTAGTAG |
| | AGACGAGGCTTCACCATGTTGGCCAGGCTGGTCTTGAACTCCTGACCTCAGGTGATCCGCCC |
| | ACCTTGGCCTCCCAAAGTGTTGGGAGGCCACTGCACCCGGCCTACCTTTG |
| SEQ ID NO: 177 | CATGATATATGTTTCAAAAAGAATTAGCATAGAAATCCTGGTCTCCTAGCCAAAAAAATCA |
| | AAGGATTTTCAAAAAAACGAATCTGTATGTTGAGGCAAAAGGATTGAACCTGGAAGTCTGG |
| | GACTTTATCATAGAAACAAAGTCTCAGATATTTTAGTTCTTTGGAAACAAATGCTGTAATTC |
| | AAAAGCATTTGACCTGTCACTGTACTATCTACATGTGGAAGAATGTTCAAGTTGAATCCTAA |
| | TGCCGTGAATGAAACACAGTCTGTGTAGGGAATGAGCAAAAAAGTTGAATTCCA |
| SEQ ID NO: 178 | AGACACAATGGAGTTACATAAAATGCTCAATTAAAACCAGAAAAGTCAGAAAAATAGTAG |
| | AAGAAAAAAAAAGAAAAAACCCATGACAAAAAGCTGTTATAATTAAGGTAGCTATCCAAT |
| | CAATAATATCAATATCACTTTAAACGTAAATGGTCTATCAGTTAAAAGAGACTATCAAAGT |
| | GGATTTAAAAAAAAGCAAGACCTGATAGAATGTTTTCCACAAAAAAATCACTTCACAAGCA |
| | TGTATCTGATAGACTCATATCCAAATTATACAAAGCATTCCTAAAATTTGACAATGAA |
| SEQ ID NO: 179 | GCAAGGGCTCTTGTGGCAAGAAGCTTACATCAGAGTGCAGAAGACAGAAAGTAAACAATA |
| | AACATAGTAAATTAGTCAGTTTTCTAGATTGTCAGAGGTGATAAACTCTATGAGAAAAGAA |
| | AGTAGAAAAGGTAAGGGGGTTAGGAATGCTGGGGGAGGAACAGATTACCACATTAATCAG |
| | GATGGTCCATATTAAATGGTATGCCCTCATTAAAGAGGTGAGATTTGAGCAGTGACTTAAA |
| | ATATAATGTAAACCAGCAGAAGATGGAAGAGAAAACTAAAATATTAAAAGTGAAAATA |
| SEQ ID NO: 180 | AAACTAGCAACAGAGAAAGCTAAAATCCAACATGTTTTGTGTTGCAGAATCCTCCAAAAGC |
| | CTCAATCTCTGTAGAAACAAGGAAGAGGCGAAGGAGACTCTGAGGAAGAGGATTGATTTTA |
| | AAAAGTCTAGTAGTCGGAGCCCCTTCCCAACCTCACACAGCTGGGCATCTGCTCCTCTGTCA |
| | GTACAATGAAAGAATAAAGTCATATTCCCTGGAGTTAATAAAGCAGAGGGTCTCCGTACAG |
| | GGAGTGAGTGTTAAGGTCAGGGGTTCTATACACTGAACTTAGAAAGCGTACGTGC |
| SEQ ID NO: 181 | GCAGAGGGTGGGGCGGAAGAGCAGACGGGGACGGGAAAGGCGCTGTCGGTGACATCACAG |
| | ATAGGGCGATTCCTATGCAGAGGAGGCAGCTCAGGGGCTGCTGCTTCGCCAGGAAAGATTT |
| | CTCGTGCTGTGGGAGCTAGTCCAGGACTTCCGGTTGGACGTGATAGTCCCAGCTGTGTGTCA |
| | GGGCTAGGAGGACTTGAGGCGGCATGGGGGCGGGGTGGGGGAATGCGCGGGGCAAGTGAC |
| | CGTACGTGTAAGGGGTGAGGCGTATGGAGCTGTGGCAGGGCGGAGGTGCGTTCATTC |
| SEQ ID NO: 182 | TACCAAAGATGATGAAAATAAGTATATGTACAAAATATTTTAGTATTTATGTGCCTGTAAAT |
| | ACAAAAGGAGCAATAAAAGTGATTTCATTTCAGAAGGTGAACATTTTGAAAGAAATAATAT |
| | TCATGTAAATTCTGAACTAAAATAGAATGAAATAAAATTCTGAAATAAGATAAAAATAGAA |
| | TGTTAGCATTATAGGAAACTATGGAGATTATTTGAGCTAATCTTCTCATTTTATGTATATGGA |
| | AGCTGAGAAGTGACATATCCATAGTCATACAGCTAATAAATAATCAGGATGGA |
| SEQ ID NO: 183 | GCGTTGGGTGAGGCGGAAGAGCAGACGGGGATCCAGAAGGCGTTGTCGGTGACATCACGG |
| | AGAGGGCGATTTCTATGTAGATGAGGCAGCGCAGGGGCTGCTGCTTCGCCACCTGCTGCTTC |
| | GCCACGAAAGAGTTCCCGTGCCGTGGGAGTAAGTCTGGGACCTCTGGTCGGACCGGAGAGT |
| | CGCAGCTGTGTGTTAGGGCTAGGATGGCTCCTGGATGCGCGTGACGCAAGTGACCTTGCGT |
| | GTAAAGGGTGAGGCATATGAGGCTGCGGCGGGGCGGAGGGGCGTGAGCTTATACTT |
| SEQ ID NO: 184 | CGGAGGGTGGGGCGGAAGAGCAGACGGTGTCTGGGAAAGGCGCTGTCGGTGACATCACGG |
| | ATAGGGCGATTTCTATGTAGATGAGGCAGCGCAGGGGCTGCTGCTTCGCCACTAAGGAGTT |
| | CCCGTGCCGTGGGAGCGGGTTCAGGACCGCTGGTCGGACCTGAGAGTCCCAGCTATGTGTC |
| | AGGGCTAGGAGGGCTGGGGGCGGGGGGGGTGGGGGGGGGGGGCGTGCGCGGGGCAAGTG |
| | ACCGTGCGTGTAAAGGGTGAAGCGTGTGAGGCTGTGGCGGGGCGGAGGTGCAAAAGCTC |
| SEQ ID NO: 185 | GGGTTTGGAAGAACCCCGCGTCCACTGTAAGCTCAGGGGAGAGCGGGAGCCAGGGAGGTG |
| | AAGTGCACAGACTGGACAGAGGCGGCGGGCAGAACCGCGGGGGTGAGAGGGCGCGTGGTT |
| | GCGGGGCGGGAGCCACTGCTGAAAGGCGGCCTGGGTTGTCGTGTGGGGTGACTGTCGGTGG |
| | AATCTTTGGCAGAGAGTGGTTTGGAAGAATGGCGAGGGGGGCAGTGGGTAGGGTGGTGAC |
| | CCTGAGCGTCCGACCAGGGCGAGGACGCTGTGCTGTCCCTGCAGGGCATGCGCTCATTC |
| SEQ ID NO: 186 | GTGGGGCGGAAGAGCAGACGGGGACTGGGAAAGGCGCTGTCGGTGACATCACGGATAGGG |
| | CGATTTCTATGTAGATGAGGCAGCGCAGGGGCTGCTGCTTCGCCACTAAGGAGTTCCCGTGC |
| | CGTGGGAGCGGGTTCAGGACCGCTGGTCGGACCTGAGAGTCCCAGCTGTGTGTCAGGGCTA |
| | GGAGGGCTGTGGGCGGTGGGGGGGTGGGGTGGGGGGGGGGGGTTCGCGGGGCAAGTGAC |
| | CGTGCGTGTAAAGGGTGAAGCGTGTGAGGCTGTGGCGGGGCGGAGGTGCAAAAGCTC |
| SEQ ID NO: 187 | GTAGGCTGAGCGGCAGAAAGGCAGACGGGGACTGGGAAAGGCACTGTCGGTGACATCACG |
| | GATAGGGCGACTTCTATGTAAATGAGGCAGCGCAGGGGCTGCTGCTTCGCCACGAAGGATT |
| | TCCCGTGCCGTGGGAGCGGGTTCAGGACCGCTGGTCGGACCTGAGAGTCCCAGCTGTGTGT |
| | GAGGGCTAGGAGGGCTGGGGGTGGGGGGGGGTGGGGGGGGGGGGTGCGCGGGGCAAGTG |
| | ACCGTGCGTGTAAAGGGTGAAGCGTGTGAGGCTGTGGCGGGGCGGAGGTGCAAAAGCTC |
| SEQ ID NO: 188 | GCAGAGGGTGGGGCGGAAGAGCAGACGGGGACGGGAAAGGCGCTGTCGGTGACATCACAG |
| | ATAGGGCGATTCCTATGCAGAGGAGGCAGCTCAGGGGCTGCTGCTTCGCCACGAAAGATTT |
| | CTCGTGCTGTGGGAGCTAGTCCAGGACCTCCGGTTGGACGTGATAGTCCCAGCTGTGTGTCA |
| | GGGCTAGGAGGACTTGAGGCGGCATGGGGGCGGGGTGGGGGAATGCGCGGGGCAAGTGAC |
| | CGTGCGTGTAAGGGGTGAGGCGTATGGAGCTGTGGCAGGGCGGAGGTGCGTTCATTC |
| SEQ ID NO: 189 | TCCCAAGAGGGGTTCGGAGGAACCCCGCGTCCACTGTAAGCTCAGGGGGGAGCCGGAGCC |
| | AGGGAGGTGAAGTGCACAGACTGGACAGAGGCGGCGGGCAGAACCGCGGGGGTGAGAGG |
| | GCGCGGTGGCTGCGGAGCGGGAGCCGCTGTTGAAAGGAGGCCTGGGTTGTCCTGTGGGTGA |
| | CTGTTGGTGGAATCTTTCGCGGAAAGCGTTTTGGAAGAATGGCGCGACGAGCGAGCAGAGG |
| | GGAAGGTGGTGACCCTGAGCGCTCGGCTAGGGGAGAGGAGGCTGTGCTGTTTCTCCTCT |
| SEQ ID NO: 190 | GGCTGAGTGGCGGAAGATGGGGGGGGAAAGTTGACGGAGACGGGAAAGGCGCTGTCGGTG |
| | ACATCACGGATAGGGCGACTTCTATGTAGATGAGGCAGCGCAGGGGCCGCTGCTTCTCCAC |
| | CTGCTGCTTCGCCACGAAGGAGTTCCGTGCTGTGGGAGCGAGTCCAGGACAGCTGGTCGGA |
| | CCTCAGAGTCCCAGCTGTGTGTCAGGGCTAGGAGGGCTCGGGGACGCGCGGGGCAAGTGAC |
| | CGTGCGTGTAAAGGTTGAGGCGTATGGAGCTGTGGCGGGGCGGAGGTGTGCAAATCC |
| SEQ ID NO: 191 | TAGGTCCGCTGAGGGGCGTTGGGTGAGGCGGAAGAGCAGACGGGGATCCGGAAGGCGTTG |
| | TCGGTGACATCACGGAGAGGGCGATTTCTATGTAGATGAGGCAGCGCAGGGGCTGCTGCTT |
| | TGCCACGAAAGAGTTCCCGTGCCGTGGGAGCAAGTCTGGGACCGCTGGTCGGACCGGAGAG |
| | TCGCAGCTGTGTGTTAGGGCTAGGATGGCTCCGGGATGCGCGTGACGCAAGTGACCTTGCG |
| | TGTAAAGGGTGAGGAATATGAGGCTGCGGCGGGGCGGAGGGGTGTGAGCTTATACTT |
| SEQ ID NO: 192 | GGGCGGAAGAGCAGACGGGGACTGGGAAAGGCGCTGTCGGTGACATCACGGATAGGGCGA |
| | TTTCTATGTAGATGAGGCAGCGCAGGGGCTGCTGCTTCGCCACTAAGGAGTTCCCGTGCCGT |
| | GGGAGTGGGTTCAGGACCGCTGGTCGGACCTGAGAGTCCCAGCTGTGTGTCAGGGCTAGGA |
| | GGGCTGTGGGTGGTGGGGGGGGGGGGTGGGGGGGGGGGGGCGTGCGCGGGGCAAGTGACC |
| | GTGCGTGTAAAGGGTGAAGCGTGTGAGGCTGTGGCGGGGCGGAGAGTGCAAGAGTTC |
| SEQ ID NO: 193 | GCGTTGGGTGAGGCGGAAGAGCAGACGGGGATCCGGAAGGCGTTGTCGGTGACATCACGG |
| | AGAGGGCGATTTCTATGTAGATGAGGCAGCGCAGGGGCTGCTGCTTCGCCACCTGCTGCTTC |
| | GCCACGAAAGAGTTCCCGTGCCGTGGGAGCAAGTCTGGGACCTCTGGTCGGAACGGAGAGT |
| | CGCAGCTGTGTGTTAGGGCTAGGATGGCTCCGGGATGCGCGTGAGGCAAGTGACCTTGCGT |
| | GTAAAGGGTGAGGAATATGAGGCTGCGGCGGGGCGGAGGGGCGTGAGCTTATACTT |
| SEQ ID NO: 194 | CAGAGCTAGAGCCGAGATTTTAAAGATGGTAGGTTAACACCATAAAAGACAACAATTTTGA |
| | AAGCAGTTGGGTGAAAGCAGTATGTAAGTTAGTAATATTTAAATAAAACTATCCTGGAGGA |
| | ATTGTTACTGAGTTAATTGTTGCTGTAATAAACACTAAGACCTTGGAGGAAAAACGACGCT |
| | GTCCTAATGAAAATCAGACATTAATTAGCATAGAAATGGCACCGCGATGCCGCTCTAATTTC |
| | CCTTTGGTTGGTTTCCATGGAAATCTGTAGGTAAAGTGTGCTTTTAAAAGTGTTT |
| SEQ ID NO: 195 | CGAGGTCAGGAATTCGAGACCAGCCTGGCCAACATGTTGAAACCCCGTCTCTACTAAAAAT |
| | ACAAAAATTAGCCAGGTGTGGTGGTGGTTGCCTGTAATCCCAGCTACTTGGGAGGCTAAGG |
| | TAGGAGAATCGCTTGAAACCGGAAGGTGGAGGTAGCAGTGAGCCAAGATCACGCCACTGC |
| | ACTCTAGCCTGGGCAACGAGCGAAACTGTGTCTCAAAAAACAACGAAACAAACAAACAAA |
| | CAAAAAAGTTTTTGAAGAAAGTCAAAAGAATGTATTCTGTATTCTAAAAATGCATTCT |
| SEQ ID NO: 196 | TGGAGTCTCGCTCTGTCGTACAAGCTGGAGTGCTGTGGCGCAATCTTGGCTCGCTGCAACCT |
| | CCACCTCCCGGGTTCAAGTGATTCTCCTGCCTCAGCCTCCCGAGTAACTGGGATTACAGGCG |
| | CGTACCACCATGCCTGGCTAATTTTTGTTGTATTTTTAGTAGAGATGGGGTTTCACCATGTTG |
| | GTCAGGCTGATCTTGAATCCCTGACCTTGTGATCTGTCCACCTCAGCCTTCCAAATTGCTGG |
| | GATTACAGGCGTGAGCCCTGTGCCTGGCATATGTTTAAAAGTTGATTGGAC |
| SEQ ID NO: 197 | ACAAGCAATGGGGAAAGGATTCCCTATTCAATACATGATCCTGGAATAACATATGCAGAAG |
| | ATTAAAACTGGACCCCTTTATTTCACTATGTATAAAAAATCAACTCAAGATGGATTAAAGAA |
| | TAAAATATAAAACTTAAACTATAAAATCCCTAGAAGAAAGCATAGGAAATACCATTCTGGA |
| | CATAAGAACTGGCAAAGATTTCATAACAAGGACACCAAAAGTCATTGCAACAAAAACAAA |
| | AATTGACAGGTGAGACCTAATTAAACTTAAGTGCTTCTGCATGGCATAAGAAACTA |
| SEQ ID NO: 198 | TTTTATAAGGAGTAAACAAAGCTAGAAAGAACCAGGTATGGGGAAGTGAGGCAAACGGGT |
| | GACGTGATCAGATAGATCAGAGACTATTTTACCTGGAGGCCAGTTTATTCTCCGGAGGGGCT |
| | GTATGCTTTTTCAGGATAATGGTGGGGCAAAATTTAGGGGTCTGGAGGAAGGAGAGAGCTT |
| | AACCAAAATTTTATTAAGGGGCATTTTGTTCCAATTGATCAAAATTTTCTTCTTTCTGTACAG |
| | AGGCTACAGTTGCCTCATGGTCTGTATGTCCTGGTCATCAGAAAACATTATTCA |
| SEQ ID NO: 199 | ACCCTAAAGACCGTCGGGTGGGGGCTGAGGGCGAGGGGGGGGACACCGGGGCCGCGGGCG |
| | GGGCGCACCCGGAACCCCGACAGCTGTGTCTTGGTGGAGCTGTGGACTGCGCCCGCCGACT |
| | CCCACGGCCGGGGCGGCGCTGAAGCAGAGAGAGGCCTGGGTGGGAGAGCCGGCCCCGGGC |
| | AGGGTGCGGGCGTTGAAAAGTGCGTGTCTGCAGGTGCCAACCCGGGCTGTGAAGACTCATC |
| | TCCTGGAGGGTTCCTAATGTCATGCTAGAGGGCTGACGGAGATACAGAAGCTCATCGC |
| SEQ ID NO: 200 | CCTCTAATATTTCTGAAGCAGTGTCTGGCATGTAGGAAACTCTATGTGAGCAGTTGTTAAAT |
| | ATATAAGTGTTTGAATCTCCTGAGTGTTTCAATTGTTCAGCAAATTTATAATCCACTTACGTT |
| | TACTTTCACCATCTTCTGCAATGAATATTATGAGAAACTCCACATGCTTTGCAGAAATCTAT |
| | TTACATGGTGTCTGGAGTTTTTGATCAACATAGCAGTCACTTAATAAAGGCAGTGAAGTTAG |
| | TTTGAAATCACTTTATGAACAGTAAAATATTTGTTATTAATATTATTACAA |
| SEQ ID NO: 201 | CTCACTGCTGCACAGTTGGCCCCCTGTCTCTGTGGGTTCTGCATTTGTAAATTCAACCAACTG |
| | CAAATCGAAAATATTTGGGAAAAAAATTCATCTGTACTGAACATGTACAGACTTTTTTCTTG |
| | TCGTTATTCCCTAAACAATACAGTATAACAACTATTTACATAGCATTTACAGTGTATTAGGT |
| | ATTATAAGTAATCCAGAGATGATTTAAAGTATACAGGCCTATGGATGTAGGTTATATGCAA |
| | ATACTATGCCATTTTATATCAGGGACTTGAGCACCTTCAGATATTGGTATCT |
| SEQ ID NO: 202 | AGGCGGGAGGATCTCTAGAGCCCAGGAGTTCAAGACCAGCCTGGGCCACATACTGAGACCT |
| | CATCTCTACTAAAAAAGTTTAAAAATTAGCCAGATATGGTAGCACACACCTGTAGTCCCAG |
| | CTAATCGGGCGGCTGAGTTGGGAAGATCGCTTGAGCACAGGATGTCAAGGCTGCAGTGAGC |
| | TATGATCATGCCACTACACTCCAGTCTGGGTGACAGAGCAAGACCCTTTCTCTAAAAAATAA |
| | AAATAAATAAATAACATAAATAAATAAATAAATAACAAAAATAAATAAAAATCTA |
| SEQ ID NO: 203 | TATGAATTGTTTAGAGCTGCACTGTCTGACATGGTAGCCATTAACCACGTGTGGTCATCGAG |
| | TGCTTGACACGTGGCCAGTAGAAATTAAGATGCGCTGTGTATGTAAAATACACACCCAATTT |
| | CAAAAACTCAGTACAAGTGAAAATGTAAGCTATTTTCGTAATTTTTGTATAATGATTACATG |
| | TGAAATGATAATAGCTTATATAATATTAGGTTAAAGAAAGCATTAGAATTAATTTCATCTGT |
| | CTCTTTTCACCTCTTAATGTGGTTACTAAAAAATTTTAAATTACATATGTGA |
| SEQ ID NO: 204 | AATGGGGACAGGAAATAAAGCAAAGCCTCAGAGTCCTCCTCCCAAACACAGGAGAGCACC |
| | AGGGGCTTTTTTTCTTAGAGACTGTGCCCCTCCTCTGATTACACACCTTCTCTCTACCCTCCA |
| | TGCATGAAGTTCCCCACTGTTTTCACTCTTCTTTCCTCGTGGCATACATTATGATTTCACTTTT |
| | GGTGGCCAATAATAGTTCACTCTCTATATATTTGTTGAGCACTTACTATGAACTGGACACTC |
| | TTCTAGATGCTGGGAATGCAACAGTGAACAAAGACAAAAACCCTTGCCTTC |
| SEQ ID NO: 205 | TGAACTTAAAAGTTAAAAAAACACAAAAATAAAATAGGGGTTATAAGCAAAATGTGTGCA |
| | ACAGGTGGTACATGTGTAAAGACTGTCAAGATTGGGTTGAAAAGTCTGTGAGAGTGCCTTT |
| | GCAGCTTGCTTCTCTGAGCCTTAAGGTGTTCCACCTCTAAAATTGGTTGAAATGAGGTATTG |
| | TATGGAAAAGGCTTTGGTAAACGAGGAAGTGCTATACAAATGTCAAATATTAGTTTTTTCAT |
| | TAGTTATATTGTTATTTTATGTCACTGTTATAACATTGACATTCTGTTCAGTGTT |
| SEQ ID NO: 206 | ATAGAGAAACACAAGATACAAACCCAAAGTGAAGGAGTGAAAGAGTGAGGGACATAACAT |
| | TATGTAGAGATGTGAACTGGACCACTTGTGAAGAGATGGTTTTTGATACAAGAAACACTTC |
| | CCCCACTGTATTACATTGAGCAATATGAAACTGGCATGTTCAACCATTTTTGAAATATAAAA |
| | GTAAAAATTTCATATAGTTCAATGTTATGGTAGAAAAGAAACAAGAGAAAGCAGCTACAAA |
| | TGCACTTAGATTTATAGATTTAGTGGTGGAAATTTAAAGAAGCACCTGTCTCTCCA |
| SEQ ID NO: 207 | TGCTCTTCTAAGAATTCTTACCACTGGGACATTTTGTTGACATAAGGCACTGTGTCTCTATGA |
| | AACAAAATGGGACTCTAGCAGAGAAAACATATCAAATTACTTGAAAGATTCTTGAGTATTG |
| | ATTTATATCAGGGGTTGGCAAACATTCTCTAATGGGCCACATAGTAAATATTTTAAGCTTTG |
| | AAGGCCATATGATCTCTGCTGCAACTTCTCAACTTGGCCATTATAGGGTGAAAGTAGCCATA |
| | GACAATACATAAATCAATGTGTGTGGCTGTGTTCCAATAAAACTTTATTTAT |
| SEQ ID NO: 208 | GAGGCAGGAGAATAGCTGGAACCCGGAGGCGGAGGTTGCAGTGAGCCAAGATTGTACCAC |
| | TGCACCCTAGCCTGGGCAACAGCGAGATTCAGTCTCAAAAAAAAAAAAAAAATAATAATA |
| | ATAAATAAATAAATAAATAAATAAAATTTAACCAGGCATGGTGGTGTGTGCCTGCAGTCCC |
| | AGCTACCTGGGAGGCTAAGGTAGGAAGGTCCCTTGAGCACAGGAGTTTGAGGCTGCAGCGG |
| | GCCATGTAACGCCATTGCACTGCAGCCTGGGTGACAGAGTGCGACCCTGTCTCGAAGG |
| SEQ ID NO: 209 | CCTGAGATCCTGCCTTCTCCAGCAGTGCTTAGTGAATAAGGTACGATTCTGTGTACCCAGAG |
| | CCACTGGGCTGCCCAACACACAGTCATAATTAGCTTCCTTGTGGGGTGCCTAGAATACAGG |
| | GATGAGTGAGGGCACAGATCCTGCCTGCCGGAGCTGAGAGAATTTCATTTCCCTGTAGTGA |
| | CAGAGTGTGTGTCCAGGGAGTTGCAGGATTTCCATGGCCACCCCTAGGCTCTCCTGACCTGT |
| | TCAACAGTGACCATTCCTTCTGAAATATTATTTCACTTATAAAAAGCTTCCTAC |
| SEQ ID NO: 210 | GTATATAATACATATAACATGCAAAATTTGTGTTGTTTATATTATTTGTCAAAGCTTCTGGTC |
| | AACAGTAGGCTGTTAGTATTTAAGTTTTGGGGAAGACAAAAGTTATATATGGATTTTCAACC |
| | TCATTGGAGGGTTGACACCTCTGACCCCCATGCGGTTCAAGGGTCAACTGTACTCTCTATTT |
| | TAATTGGGATAATGGTTACAGATGTGTATGTATTTGTCAAAACTGACCAAATTGTTCACTTA |
| | AAATATATGCATTTTATTGTTTGCAAATTATACTGTAATAAAAGTCAAACA |
| SEQ ID NO: 211 | AGGCTGCACTGTCCCAGGGGCACCCAGCCTCCAAATGAGCCTCAAGGAAGGGTCTGGAAGG |
| | CCAGACAATACTATGGTCAGATTATGGACTTGGGAATTGCTGCAGATGCCATTGGGGGTAA |
| | GGAAGATTAGGAAATTCTGGAACTCAGGAGCTGCCCAGGCAGCCAGACTGCCTCTGACACA |
| | CCCAGTCCTCATTTGGATTTGAGGAAAGGAGACTTGAGCGCAGGAGAAAGGCACCCAGGAG |
| | CCTGTGAGTCGTGCCTAAGCCTCTGGATCCCACATCTGAGGAAACAACTTAATGTA |
| SEQ ID NO: 212 | AGATCGAAAAGAAGTCATTCATGAAATGAAATTTTCTCCAGATGGTTCTTACCTTGCAGTGG |
| | GATCCAATGATGGCCCAGTAGATGTCTATGCTGTTGCCCAGAGGTATAAGAAAATTGGAGA |
| | ATGCAGCAAGTCCCTTAGTTTCATCACGCATATTGACTGGTCCTTGGATAGTAAATACTTAC |
| | AAACTAATGACGGTGCAGGAGAACGATTGTTCTACAGAATGCCATGTAAGTCATGTGGAGG |
| | CCTTGGATGTTTCTGGAAAGCAAAATTTTGAACCAGGTGAAGGAAATACAGGAC |
| SEQ ID NO: 213 | TGCCTACCATATGCCTAACAAAGAGAAATAGGAGATAGGCTTCCCGTCCTTAGAGAGTTTA |
| | TGACATCTCCGAAGAGACAAGATCAAGTGCGAAAGACAGATTGGAACACTACAAGAAGGA |
| | ACCTAGCAAAGCTCCGAATTGCTTCTTGGGCAGAACCGAGTACCTGATAGACCATTGGGTA |
| | CTGGGGTCACCTGGTAGGAAGCAGAGAGAGAATCATTTACCATGGAGTTACATGGTAGTTA |
| | CCAGAAATTTGTTTTGTTTTCTTTTTTAAGTTGTTGTTAAAAATATTTTTCTCAGAT |
| SEQ ID NO: 214 | TGATATGTATCTATTAAAATGCCTACAGCAAGCATTATCCTAAATAAGAGAAATATCAGAA |
| | ACATTCGCTTTGAAGTTAAGAATGAGAAACCAAGGCACACTTTTACCACTTGTATTCAACAT |
| | CGTAGTGAAGGTCATAGCCAGAGCAGTGAGCATTGTAGCCAGTGTACAGTAAGACCCCCCA |
| | AAAAGTAGAGGCATAGGATTGAAAAATGAGGAAATAAAACTATAATTATTTGAAATTATTA |
| | TAGTGATAACCCAAAAGATATATAAATGGATTATTTAGATAAGTTTAAAAGAGTG |
| SEQ ID NO: 215 | AATTTGTAATACATCAGGGGTTTCAATAATGGAATTCACAGCCAGCTGACAAACAGGTTTTT |
| | ATTAATGACACAAGTTTTCAATGAAGAATTTTAGCAAAACAACTATTTTAAGCAATTGCATT |
| | TCCAAACAAAAAAAAGATGCACAGCAGTATGTATAAGCCTCTTGAATTATAGAATTATTTA |
| | TATTAGCAAATAAAAAAACTAACCTAGATGTCTAATAAGAAGTAGTAAAAGGCTAATAAAA |
| | TAGCAAAATGTTTACAATATTGTTGAATGAAAATCATTTCAAAAAATAGATCTA |
| SEQ ID NO: 216 | AAACAAAACACAGTAATGGAGATGAGATGCGCTTTTGATGGGCCCATCAGTATAATTTGTA |
| | GAGCTGGGTAGAGAATAAGTAAACTTAAAGATATTACCCAAAATAAAATGCAAAGAGGAA |
| | AAAAGCAAAAAAAATCTCAAGACAGTACAGATAATCCAAGAACTGTAGGACAATATCAGA |
| | AATATCAGACAGTCTAACATAAGCATAATTAGAATTCCAGAAGAAGAAGAAAGATAAAATT |
| | AGGCAGAAAACGTATCTGAGAAAAATAATGGCTGAGAACTTTTAAAAATTAGTGACAG |
| SEQ ID NO: 217 | TGCCAAATAATAACAAAATATAATAAAAAATATAAAAAGAAAAAGAAACACCAGATGGAT |
| | TTCCCATTCTTGAAATGAACCACTATTAACAGTTGTGTGATTTTCTTTGTTTCTAATCTTCAA |
| | AACAAACATATACACCCATACAATTACACATATACATATAATGAACAGTGCATTTTTTCCCT |
| | TCAATTTCAGTTTAACATATAAATCTACTATCTCTCTATCTATCTATCTATCTATCTATCTATC |
| | TATCTATCTATCTGTGTATCAATCATCATTTATCTATTTATCTAACATCAC |
| SEQ ID NO: 218 | TAGCTGCGGGTGGAGTTCAAGAGCGCGCCGCGGTCCCGCCCCCGCCAGCCCCGCCCCGGCG |
| | AGAAAAGCGTATGCAAATTTTCGAGCGGCCGACGCGCGGTCTTCTGGGTAAAACCGAGCCG |
| | CCGCTTTTGCGACCCTTCGGGAGCCTCAGAAAACAAAGAATTGGGGTGTCGTCGAAAGCTG |
| | TGGAGGCTGGAGGTAAGCTAGCTACCAGACCGACTAGGGCGAGGCTCACGAATTAATTACC |
| | ACAACCCTACCAGGTATTGGCGCTTCCTGCTTGCAGCCCAGGGACTTTCTATTATA |
| SEQ ID NO: 219 | AAAAAATTGACGCCTGAGTACTTTGGGTGCCTTTAAAATGTTTGCCTCCAGTAGAGTGCCTC |
| | ATTCACCTCACTCTATCCCGCCTGGTTGCAGAGCCACGGTAGTGAATGGTTTACCCTCAGAT |
| | AGACAGTGGGGTCCCACCAAGCCGTTTCCTGCTGTCCCACTGCAAGATGCATGACAAACCG |
| | CCCTGCACCTGAGGTTATTAAGACAGACTTGGGAGAGAAGACGAGACCAGGCAGAGAGAC |
| | AAAGACAGAAAAAGAGACTGAGGAAAACTGAAGGACAAAGGTGGAAAGAAGTGGA |
| SEQ ID NO: 220 | CAGAAAGAACCTTTGGGCCCAGGACCCTGGGTTTTGTAAGAACCAGTCTTTGGGAGAACAG |
| | ACCTAAACCCTCTTCTTCTAAAGTGAGTGGTGTTTTTACTAGTTGCTTCTTCAAACTTTGTAA |
| | TTCGAGTCCTTCTTTAAAGTAACAAAAATGTTTTTAAAGTCTTCTGCTGAATCTCTTACCAAA |
| | CAATAACCTTCAAGTTTTGGTGAAACCATTACTTTTATATGTTGAGCTTGCTTAAAACAAGG |
| | CACGCAAGTAATCCTGTGACATACTCCATTTTCTTCAAAAACTGATGAACA |
| SEQ ID NO: 221 | AAATCCAATTCTGATCAAACTTGTTATAAGTTGTCTTGCAAAAAATGTTATCACATTTGGTA |
| | ATCCTACACTTTTGTAATTTAAAAACATAGAGTTTGCAAACTCATGGTCATGATTGTTTTGTT |
| | TGTCCCACATAATCTTTTTCCAAAGTCTATTTTACTTACCGTCTTTAAAAAATAAGAGAGTTC |
| | AGAAGATAATTTTAAATTCCAGATTTCTAGGAAAAAAAGAGGGAGAGGGGCTAATTTGACA |
| | GTGCACAGTTTGAATTTCTACTTAGCAATATTCTTCCAAAGCACAGGGGCT |
| SEQ ID NO: 222 | AATGTTGTGTTTTTGTTGTTTGTACAATTTTACTAGTGCCTAGTTCACAATCCAAATACAAAT |
| | CTAGGTGATTTTTGAATAATAGATGATACTTGTTAAACTCTTACTATATCACTACTGTTCCAA |
| | GCACTGTGAGATATTTTCCCATTTAGGCATCTAACAGTTCTGTGAAATTAATACTGTGAAGC |
| | ACAGGGAGATTAAATGACTTCTGACAGGACACATAGCAAATAAGTAATGGAGCTGGGATTC |
| | GCGCTCAAGAAATATGACTCCATGGCCTCACTTAAGTTCACACACTGTGAT |
| SEQ ID NO: 223 | TACGAATGATTGCATCTTCCTCTTTAAACTGTTTTGTTTTTTAATAGAAAAAACTTCAATTTT |
| | GCCAACTCTTCCCCATTTTAATTGTTAGTTTGAGCTCCTTCTTTCACATCCTCCATTTGACAA |
| | ATTAGTATCGACATCTTGCAAAGTCTGATGATACCTTTTTAACTTTTTTCTTCTTTTTTATATA |
| | CAAGTCAAGTCTTCTGGGGTTTTTTATTGGTAGTTTTCTATTATTCTATTTTAGTAGAGACTA |
| | TGTTATTTTAATTTTTACTATTATATATGTGTGTGTGTGTGTGTGTA |
| SEQ ID NO: 224 | TTTTTACCAACCCTGAATTACCATCAGCTCCCTGTGAGTTTGGTTAGCACTATCCATGGGGTC |
| | CCTTTGGGAAGAGTGGTCCCAGGGGGACTACTGATAAAATTCAACTGAGGTTCTCAGTGGG |
| | CAGGCAGGCTAAAGCTCAAATCCTTTGTGGTCAAGATACAGGCACACTGTGAGGTCCGGTC |
| | CCAAACAATCTATTGGCTTCTCCCTCTTTTTGACATCCTAACTGTGGCACAAGGAATGTCCTC |
| | TTTAAATGAGTTTAAAAGGCAATTGAAATGAACATAAATCAAATGAAATGCT |
| SEQ ID NO: 225 | ATTTGTTTTTTTACTGAGCTAATTTTAATGATTTCAGCAAAAGTTATTTTGTTATTGAGTGAT |
| | GAAACAAAAGATTTTTGAGGGTGTTCATGAGCATAAGTGTATCATATAGTCACTTATGGTTG |
| | TTGTGTTCCTAGTACTTAGTACAAGGTATCGGAATTGTTCTTTAGTTAATCTTTTATCTTGAG |
| | AAGTTAAATCTTGGTGTAATCTTATCCTCATGTTCATATAAAGATATGTGGAGTTTGTAGTG |
| | AGGACTTAGAGCCGGGTACAATTTCATGGTTAAATTAGAAATGCTTTTGG |
| SEQ ID NO: 226 | CCATAGGCATCCATACAACAGAAACTTCGATGGAAAATTTCACCATTCAAGATTTTAATTGA |
| | ACTGATGGCCAGGCCCTTCTCCGGTGGAAAAAAAATTAGATAAAATTAAAAATGCTTTCAT |
| | TTGGAGGTAAGCTTTAAAAAGGGGTGGAAGAAAAGGGGGATCCTCAAGTTTCAGGAATGAT |
| | TAGAAAATTCACAACCAGAGAACTTAGCACATGATGACACTGCATTGACCACACAGCCTAC |
| | AGAGCTGGAAATAAGACCTACAGTTCTGGGAATTGGGGTTCTAAAAATCACATGG |
| SEQ ID NO: 227 | ATATATTCTTTTTTTGAGACAGTGTCTCACTCTGTCGCCCAGCCTCCTGAGTAGCTGAGACCA |
| | CAGATGCGCGCCACCACACCCGGCTAATTTTTGTAGTTTTTGTAGAGACGGGGTTTCACCAT |
| | GTTAGCCAGGCTAGTCACGAAATCCTGGACTCAAGCAACGGGGGCAGATATATTCTTAATT |
| | GCTGTGTATTGAGTTAATCCTCTAACACTGTGGCACTTACCTAATGAGAATTATAAATTCAT |
| | AATTCTGCTAAGGGACTATCCTGAGGCTTAAAGCCTGAAAAATTCCCTCTGA |
| SEQ ID NO: 228 | ACATGCGACTCTTAATTTGGGACGGACAGAACAGCCGTACAGACCAGTAGTTCTCAGCGCC |
| | TTTGCTTACCCTGGGTTGCTCAGAAGACTTACTGGTTACTGGTTCCTTCTTCCCTTTTGAAGG |
| | ACTTAAAGGAGAAGAAGGAAGTTGTGGAAGAGGCAGAAAATGGAAGAGACGCCCCTGCTA |
| | ACGGGAATGCTGTGAGTGTCTGCTTTGCTCCTGAGCCCTGGCAGCTACCGCCCCACAAAATT |
| | TTTCCTGTTCTACTTTAAACATACCTATATATGTGTGTGTATGTGTATATGTAT |
| SEQ ID NO: 229 | TCTTCAGTCTGTCAGCCAATCCCAGAGGGAATCTTTTGGACTCTTGTGGCTTCTGGGTCCAC |
| | ATTTATTTTTGTTTTGGACAGAATACACTCAGAAAAAAAGAGAGACGGACTTAAAAGATGC |
| | ACTGTTCAAGTAAATGCCCAGAATTCAAATCGACATCAAGTTGGAAAACCGTCTCTTGTTAG |
| | GGACATAAATGAAAAGTAGATGGGTCTGTATGAGCGTGCAGGGAGTTTGGGAAGATAAAG |
| | TTTCTATTATCTAAACTGATAAAGCCTGGTATGTGTTTTATTCAATAATTAGAGG |
| SEQ ID NO: 230 | ATAAGACACCACTCAAAACAAAGCAAACACATTATAGGACAAAAGAAAACAATTCAAGAA |
| | ACAAGGCTAGAAGAACAGAACACTACCACTGTACCAGTTAAGGCTCCTGAATATAAACAAC |
| | AGACATATATTCTAGTGAATCTAAGTCAAAAAGGAATTTATTGGCTAGGTACTAGATAGTTC |
| | ACAACACTAAGACAAGGTTGGAAAATCCAGCTTGGACAGGAATCAAGGAAGGCAAATCAC |
| | AGAAGAATGTTTGCCTCCACAGCCTTGAATGAAGACTGGAACTTATGTTACTGAATC |
| SEQ ID NO: 231 | TTATAAAAAAGAATTAACACCAATTCTTCTCAAACTTTCAGAAAATTGAAGAGGAAGGAAT |
| | TCTTTTTAACTCATTCCATGAGCCCAGCATTACCTGGATACCAAAATCAGAAAACACACAAC |
| | AACAAAGAAGAAAACTATAGGCCAATATCCCTGATGAATGTAGATGTGAAAATCCTCAACA |
| | AAATACTAGCAAGCTGAATCAAACAACATATTTTTTTTTTTAAAAAAAGCACCATGATCAAG |
| | TGGGATTTATTCCAGGGATGCAAGGATGGTTCACACAGAAATCAATAAATGTGA |
| SEQ ID NO: 232 | AGAGGGACATTTGGATAAAGTGAAGAGCAGAACCTACCTATTAGGGAAGGGAAGTGGATT |
| | GGGTTTCCTACCCTGTCTGTAGACTCCATGAAGAACCATGTCTCTCCAGCCAGAAAGATATT |
| | CTTGCTTAAGTAGCTCCTTACAACCTACTTCTTCATAAATTTTGTAGATTCTTTCTTAAAAAT |
| | TGAAATATAATTTACACACCATAGAATTCATCCTTTTAAAATATATAGCTCAGGATTTGTGG |
| | TAAGTTCACAAGGTTATGCAATCTCCACCACTAATTAATTCAAGAATATTTTC |
| SEQ ID NO: 233 | AGCTCTCATAGTGATGGTGCATAGGCTAGTGGTGGCCCCTAAGACACCAATGCCAGTGGTT |
| | CACATCTGCTAGCCAGCTCGTCTCCAGAAAAAAGTACAGCACAGAAAATATCACAGTTCTA |
| | ATTGTTCCATACTCAGTAAGAACCATACTAACTACACATATTCAGATGAAAACAGTATTAGA |
| | ATACAGGTATTAGACTTCAGAGCTTTACTAAGCCCCATTCTAGAAGGTTGGACTAAAATACT |
| | AAAGATAAAAGGAGGACCAAAGTTAGGAAATTACAAGATATATAAGAAAAATTC |
| SEQ ID NO: 234 | TGCTGGCCTAATAGAATGAGTTTGGGAAGAGTCCCTCCTCAATTTTTTGGGATGGTTTCTGT |
| | AGGAATGGTACCAACTCTTCTTTGTACATCTGGTAGGATTTGGCTGAGAATCTATCAGGTCC |
| | CAGGCTTTTTTTGGTTGGTAGGCTGTTTATTACTGATCCAATTTTGGAGCTTGTTGTTAAGTC |
| | TGTTCAGGGAATCAGTTTCTTCCTGGCTCAGTCTTGGGAGAGTGTGTCCAGTAATTCATCTG |
| | TCTCTTCTAGGTTTTCTAGTTTGTGTGTTCGTTACTCTTAACAATAGATGG |
| SEQ ID NO: 235 | CCTTTTCCTTCCCATTCCCTCCTTTGGTGCCTTTCTCAGAGTACATGGACTTCCTTCTGCCAG |
| | ACTGGGGAGAGAAGTCTCCATCCCCAGCTCCTAGGGACCATGCAGCTGACCTGCTCCAAGG |
| | CACACTGGCAGCCCCAGCAAAATCCTGGAGCCGGCACCAGGGCATGTCCCACGAGACTGTT |
| | AGGAGGGCTGTGCATCTTTGCCCCTTGGTTGCTCATTGAGAAGCAGTATAGGGCTTCCATGC |
| | CTGTTTGGCCTCCCCTGGATCCCTGTAGCAGCTGTTAAAAGAGAACCTTTCCA |
| SEQ ID NO: 236 | CCCTGAAACGAGTGACCCCAAAACTGCCCAGCAGCCTGAGCATTCACTGTAATCCATAATA |
| | GTTCTTTAAAAAAATTAAAAATAAAAAAAATAGAGATGTGGTCTCACTATGCTGCCCAGGA |
| | CTCAAGCGATCCTCCTGTCTCAGTTTTCCAAAGTGCTGAGATTATAGGCATGAGCCATGGCA |
| | CCTGGCCCATAACTGTTCTTAACAAACCACCTTTGGAAGAAGTCAAGTGCTCTCTCTCCAGT |
| | TCCTTGAGAAGCACTTAGAATGCATAGTAAAGACCAAGTTTTAAGTAAGAGATC |
| SEQ ID NO: 237 | CGGGCAACAAAGACAGAGATGAGGTTACTTCTCATCTCATGCCTCTCAGAGATGAGGCATG |
| | TGTTACAAACATCAAACACTGAGCTTTGGGTAGTTGCTGCTGTTTTTTATTTGTTTTTCTGTTT |
| | GTTTTGTTTTTAATGTCAGGCACAGTGGTTCAAGCCTATAGTCCCTGGAGGCTGGAGGCTGA |
| | GGCAGGAGGATATTTGAAATCCCCGAGCCCAGGAATTCGAGGCTGCAGTGAGCTATGATCA |
| | TACCACAGCACTCAAGCCTGAGCAATATAGTGAGACCCTGTCTCTAAAAAAT |
| SEQ ID NO: 238 | TTTTCTACTGTAGATGGTTTGTAGACATTATTCCCACAGAGTGGGCTTCAGGATATTCATTTA |
| | TTCAATCACCAGATAATTATTGAGTGCCTACTATTTGCCAGACTTTGTATTTGTTTTATATAT |
| | ATGAATAAATTCTTGGTACTTGTGAGGTGTGTGTGTGTGTGTGTGTGTGTGTTTGTGTGTGTG |
| | AATAAATATGTGAGCAGACAGTAGATAAATAAATTATATATTATGTTACTGGATAGTAAGG |
| | GCAATGCAAAAATAAGAAAAAGGGTAAGGGAAATGAGGGTTAAGAGTGGA |
| SEQ ID NO: 239 | AGCCTAGTCTCCCCACGAGGAGGCGGCCCCGGGGGTGGAGTCAACCCTGGAGGCCACGCTC |
| | TGTGGGAAAGCACGGGGCATGCAAACTCGAAATGAAAGCCCGGGAACGCCGGAACAAGCA |
| | CAGGTGTAAGATTTCCCTTTTAAAACGTGGAGAATAAGAAATCAGCCCGAGTGTGTAATGG |
| | CGTCAATAGTGGTGTGGACGAGACAAAGGCAATGAGGCAAGGAGCGAGGCTGGGGCTCTC |
| | ACCGCGACTTTAATATGGATGAGAGTGGGACGGTGACGGCGGGGGCGAAAGCAACGGT |
| SEQ ID NO: 240 | CTCTGTGTCTTTGTTCTCACTAGAATTTGCTATTTAAAAATTTTTACATTAAAGTTTAATCAT |
| | ACAGTACATAGAACTCTTTGAGGACTAGAGTCTTTTTTTAAATTTTAGGGTTTGTCTTTTTTT |
| | TTTTTTTTTTATAAAAAAGAAGGTACTTCTCAAGTTTATGAGAAATACTGAGAGAGCTTTTG |
| | GTGACAATCCTACCTGAAAATTAAATACCTACACACACTCTCCTGCACCTGCCTTGATTTTT |
| | CACCATAGTATTATCAGCTTTTAACATATTATAAATTTAATTATTACATT |
| SEQ ID NO: 241 | TATTATAATATTATACAGTACTATAATATTATAGTATTATATAGTAGTAGATATATTAGATA |
| | CCATGAGGATATTATGAGTAGTGCTTATACTACTGTACTGTAGTGCTTATACTCAGGACTAG |
| | CTACATAATTTACAGGGCTCTGTGGTGGGGGTGGGGAAAGCAAGGCATCTTGTTAAAAAAT |
| | TATTAAGGATTTCATGATGCCACAGCAGAGCTTTTAGCCAAGTGCAGGGTCATTGTTAAGTG |
| | TAGGGCCCTGTGTGACTGCCCTGTTGTTTACATACTGTCTCAATATATACCCA |
| SEQ ID NO: 242 | CCTCTGGACAATTTCTTTTTTGTTTTGGGCCATGAAATAATTCATAGATTCACACCATTGCAA |
| | AAAATTCTTATGCATAGTGGAAATAATTGTTATGTGGCTTATGCAATTAGGAACTTTAGAAA |
| | GAGTGAAGTCATGCTGATATAAGAGGATAAGTATTTATTTGATATTAGGTTCAATTGATAGT |
| | CTATCTTCTTTCAATTTTTAAATTTTCTTTTTCTTTTTTTTCTTTCTTATTTGGCTATTGTTTCTA |
| | GGTTCTATAATGACTTAGGCAAGTTTTTAATTAAAATATTGATTATT |
| SEQ ID NO: 243 | TGTCTTAAAAAGAAAGAAAAAAAAAAAAAAGTCTCCCTACTATACCCTTAGATATATGCCC |
| | TTCCATAGATAAACATGGTTAACAATTTCTTATGTAAACTTCCAGAAACTTCCTATGCATAT |
| | TAAAGCATATCTATATTAAAATATGTATCTTGTCTATCCTTTAACAAAATAGAAATGGGGGC |
| | CGTTCTACATATACATACTGTTTTATACCCTGCTTTTTGGATTTACTGTCTTACAGCCATCTTT |
| | GTATGCTAGCACATGTAGATGTTCTTCATTCTTTTTAAAAACAATGTTGAG |
| SEQ ID NO: 244 | TGTTGCCCAGGCCAGTCTCGAACTCCTGAGCTCAAGCAATCCACCCGCCTCGGCCACCCAAA |
| | GTGTTGGGATTACACTGTGCCCGGCCGCCTCAGGAATTCTCTAAGTGGAGAATTAGTGGTGG |
| | GAATATTACACCTGATAGCTCAGAGGTCTCTACATTCAAATTTGTCCAAGGTTTATTACTGG |
| | GGTCCCTGGACATAATCCAAAGGGTTCACAGACTAGTTGGACTGGAGGAGGAATCACTATT |
| | TCCACTAACCTCTCTCTGAAATTTAGCAAGTTTTCTATTTTAAATATGGTAAC |
| SEQ ID NO: 245 | ATTAAAGTGGAGAATTTTCGTAATCAGAGCTTTATTGAAAAGTTTAGTGTGTATAGGCATTG |
| | TAGATGTGTCTGTGGAATTTATGGACTCAGTTAAAAATTGTCACCTGATAAAAATGAAGTTA |
| | ACTGTCTATTCAAATGATGAGATTTGCATCTACAGATATATTACTACCTAAAAGCCGAGGTT |
| | GCATATATTGCCGATGGACTCCTAGAATGAGTCAGGCATCTTTTAAATCTCAGTAAAATGAT |
| | TGTTATCTTCCAGATACTATCTAAAATATCACCAATATAAGATTCCTCATCA |
| SEQ ID NO: 246 | GTTTAGCTTGAGTGCATACTATGTAAAGAGGGTCTTACAAAATGTATACCGGAGCCACAGG |
| | AGAGCAAAACAATTATTTAAGTGATGACATCTGGTCAAGATGGCACAGGAGTTCAGGCTCC |
| | AAACACCTAGCAAAGGTAGTTATAATATAAAAAGGGTAACCAAATAAGTATAGTTGGGCTA |
| | TAGTCATTCTAGTTACCTAGAATGTAAGTTGAAATACAAAGGGGTAAGCAGGCTCAAGCTG |
| | CAGGCCTCTCCAGCAGGGGCAACCAGAAACTCAGGTTTTTTAGAATAAGGGGATAT |
| SEQ ID NO: 247 | ATTTTGGCCTCATCATCACAATTCAACTGAGACAGCCAGTAGGAAAAAAAAGTGTAGTCTG |
| | AAACATTGGAAGCAATGAGAAGTGTACAAAGAACATAGAATTTTTAAGGATATTAATATAA |
| | ATAAGACCTCCATTTAGAAATTAGAATGGCTTTATTAAAGGAAGCATAGAAAAGATTTCCA |
| | TTGAAGAATGTTAAAATACATATGTGTAGTATTTATATCATTGTCATATTTATAGTATATATG |
| | ACTTTTTTTTAAGATATGGAATATGTTTCTTTCCTTTTTTAAATCTTTGTAGTT |
| SEQ ID NO: 248 | GCATCTGAATACCCTGAAGCAGAACTGCTCCTTGGTCCGATCTCCCATACTTCTTTCTATTTA |
| | CTCAGCATATTAGTTCTTACATTTTTGTGGGGTGGACTATACTCTCACTTTAACCATAAGGTC |
| | TGGTGTACAGTAAATAAACACAAAAGCATCAACTAGATGAAGTAGAAAATGCCATAACTTA |
| | AGACTAAAGAATTATAGTACCACTGTAAGTGTAGGAAGCTTGCAAAAAGGAAAAGATAAA |
| | TTTATTCTTTGCACAGAGGCATGTATGTGCAAAGATAGTAAAACTCTATGGAC |
| SEQ ID NO: 249 | GGAGAATGTTTTAAGAGCCATAAAAAAGAACGAGATCATGTCCTTTGCAAGGACATGAATG |
| | GAGCAGGAGGCCATTAGCCTCAGTGAACTAACACAGGAACAGAAAACCAAACAACCACGT |
| | GTTCTCACTAATAAGTGGGAGCTAAATGATGAGAACACACAGACACATAGAGGGGAACAA |
| | CATATACCAGGGCCTTTCAGAAGGTGGAGGGTAGGAGGAGGGAGAGTCAGGAACAGTAAC |
| | TAATGGGTACTAGGTTTAATACCTAGTGATTACCTGGGTGATTGCTTAATACCTGAGTG |
| SEQ ID NO: 250 | ACTGTTTCTACAACAATTCACTTTTATGTGGGAAGTGGTGAGTAAGTCCTGATGACCCTGTG |
| | TTAAATCTTTAAGGCCAAATGTCTTCTTTGGTCCTGGCAGGAATAAACAAGTTTTTCAAAAA |
| | TGGTGTGCAAACACACACACACACATACATAATTACAACCAGCAAATCAGATTATAGAATT |
| | TTCTGAACAAATTCACCTCAAAATATATCTATTTATATTTATATATCAAAATTGGAATCACA |
| | AATAAATGGGGAAGGGATTGCAATTTCAATAAATTCAGTGCTAGGAAAACCTA |
| SEQ ID NO: 251 | GTGAGAGGGAACCAGTGGGAGGTAATTGAATCATGGGGCCAGGTCTTTCTCATGCTGTTCT |
| | CATGATAGCGAATAAGTCTCACGAGATCTGATGGTTTTAACAAGAGGAGTTCCCCTGCACA |
| | TACTCTCTCTTTTTGCCTGCTGTCATCCATGTAAGATGTGACTTGCTCTCCTTGCCTTCAGCC |
| | ATGATTGTGAGGCCTCCCCAGCCATGTGGAACTGTAAGTCCAATAGACGTCTTTCTTCAGTA |
| | AATTACCCAGTCTCAGGTATGTCTTTATCAGCAGCATGAAAATGGCCAAATAC |
| SEQ ID NO: 252 | TGTTGTCCTGTTGTTCTCACCAGGGACAGAAGCAGCTCAGAATGCTGGACTTCAAAGAGCTT |
| | TGTTCTTGCAGTCAGGGACTAGAAACCCTAAGCAGTGATCCGTTAGTGGACATAGGACCAA |
| | GGAAATGTCAGTAGTTGCCACACAGTGAATAACTTGACTGCTGTGTCTTAAGTTTTTAACTT |
| | TCATCCATGATGTTGGATATAGTTATAGTGCATTCATTTTCATTACTATATGGTATCTCATTC |
| | TATGAATATAACAGATAATTTATCTATTCTACTTTTTATAGAAACTATTTTG |
| SEQ ID NO: 253 | TATATGCTGCCCAACTATCTTCCGAAAAGCCTTCACTACATTATTATAATCTCACCAAAAGC |
| | ACATAGATGAGAATACCTATTGCCTATATTTATTAACACTGAATGTTATTGATCTATTGAAT |
| | AAAAAGTTATCTTAATATAAAATTTCAAAAAAAAAAAAAAAATTGAAGATAAGCCACAGA |
| | CTGAAAGAAAATATTTGCAAAAGACCTATCTGATAAAGGATTGTGATTCAAAATATACAAA |
| | GAACCCTTAAAGTTCAACAAGAAAATAAGCCACCCGATTGAAAAATAGGCCCAAA |
| SEQ ID NO: 254 | CTGGCCCAGGTCAAAAATGGAGATGATCAAATCTGCTGTTCTCATCAGTAATGGAATCACC |
| | CCTGTGCATAGCCACTCACTCTAGCCTGAGCAACATAGCAGGACCCTGTCTCAAAAAAAGA |
| | AAAAACCAAAAACGAAAACCCAAAACAAAAACAAAAAAATGATAAAGAGAAAACATTAA |
| | AAGCATCCAAAGGAGTGGGAAAAATACATTATATATACAGGAATGAAGAAAAAATGACAG |
| | CAGATTCAGAAATAATCCATGCCAGAAGACATTCAATCAGCAAAGAACTGAAGAATACT |
| SEQ ID NO: 255 | TAGCACATTTGTATCAGGCTAGTTGCCAGTGTTCAGGGTACGCCTCTCCAATCCAGTCCAGG |
| | TGGTCACAGTCTAGAGTTGTTAAATTATATGTGGTTCTGGCATGTTTGGTTTGACACCAGCC |
| | AAAGGTTTTATAAACCCTAGCATTATTGACATATAGTCTTAAAAATATTATTACCTCTTGGA |
| | CCTTAATGTCTTAATCTCATTGTTAGGTTAGTAAAATTAATGTGCTTCTGATAATCTGGTTTA |
| | AGTGTATTATGCCTTTTCTTGGGCTATATAATTTATGAAAACTTTATTTCT |
| SEQ ID NO: 256 | ACATTTGAGCAGAGATGTGAAGAATGGCATTTCAGGCAGAGGAAACATGAAGTGCAAAGA |
| | TCCTGAAGCTAGACATGATTAGTGAGTTAGAGCACAAATGAGGCCAGGCTAGGGGAGGAA |
| | GGCATGAGAAGGAAGCGGTAAGACATGCAGCAGTGACAAGGCAGTGGAGGGTGCAGCTCT |
| | AATAAGAACTAATAAGTTCTAATAAGTTCCACTCTGAGGGAGGTGAGAAGAGGGCTTTGAG |
| | TAGAGCTGTGATATAATCTTGCAAGAAAATTCCAATTGTTCCATTGAAAACACAGAAGC |
| SEQ ID NO: 257 | GCCAAGTTGTACTATGCCTTTGTTACGAGGCTACAGATCTCCTCGAGACTCTGGTTTATTTTC |
| | CTTTTGTCCTCTAATTCTTAAGTTTTTTTGTGATTATTCCGAGCTATTCTAGTTAAGCTAAGG |
| | GTAACCAGGATAAAAGTCTTGGTCTGCTTTGGCCAGATTATTAAGGTGGGAATGGTGCCCCC |
| | TGGTGTGCAGCTACACAGAGGACCTGGAGGAAGAAGGAGACCTGAGCTCCCTCCCTCCTCT |
| | GCTGCCTCCTCCATTTGGAAACAGACACAGGATGGTGATCAAAAGCACGTG |
| SEQ ID NO: 258 | TTGGGAGGCTGAGGAAGGAGAATCGCTTGAACCTGGGGGGTGGAGGTTGCAGTGAGCCAA |
| | GATTGCGCCATTGCACTCCAGCCTGGGTGACAGAGCGAGACTCCTTCTTGGAAAACAAAAA |
| | CAATAACTGTGTGAGGTTAGTAAATTATAAGAACCTAAAAGCAATATAAATGAGATAGTAC |
| | TTATCATATTGAAATGAATAAGAAAGGAGGAATTGAGGGAAAGCTGAATAGCTTTTTTTCCT |
| | TCTCTGGAGATAGATCTTTATAATATAACTTTATTATTTTTCAATAAGTGAGTTTC |
| SEQ ID NO: 259 | GTTTGTATTTCTGTGAGATCGATGGTGATATCCCCTTTATCATTTTTTATTGCATTTGATTCTT |
| | CTCTCTTTTCTTCTTTATTAGTCTTGCTAGTGGTCTATCAATTTTGTTGATCTTTTCAAAAAAC |
| | CAGCTCCTGGGTTCATTGATGTTTTGAAGGTTTTTTTGTGTCTCTATCTCCTTCAGTTCTGCTC |
| | TGATCTTAGTTATTTCTTGCCTTCTGCTAGCTTTTGAATGTGTTTGCTCTTGCTTCTGTAGTTC |
| | TTTTAATTGTGATGTTAGGGTGTCAATTTTAGATCTTTCCTGCT |
| SEQ ID NO: 260 | GGCCTCTACTCTTCTTGTAGTTTAAGCTGCCTCCATCTGGTTGTGATGGCCTCCCCTGATGTG |
| | TCAGCCTCTACATAAGGGGTGTACTTGTGAAGTTTCACACTAGACCTATGTGTCCAATATCC |
| | TCTCAGTCTCCAAGGGCTCTTCCATTTAACACCTTTTCTCCTTCAACCTTGCCATGAACACAT |
| | CTTCAAAATCAGGAGACACGGGCCAGCATTTCCCTCTTCTTTTCTATTATGAGGGAAGAGAG |
| | CTGAAAAGAAAAGCATGTCATACATATAGCAACAGAAGTCTCCAGATTCT |
| SEQ ID NO: 261 | TAGCACATTTGTATCAGGCTAGTTGCCAGTGTTCAGGGTACGCCTCTCCAATCCAGTCCAGG |
| | TGGTCACAGTCTAGAGTTGTTAAATTATATGTGGTTCTGGCATGTTTGGTTTGACACCAGCC |
| | AAAGGTTTTATAAACCCTAGCATTATTGACATATAGTCTTAAAAATATTATTACCTCTTGGA |
| | CCTTAATGTCTTAATCTCATTGTTAGGTTAGTAAAATTAATGTGCTTCTGATAATCTGGCTTA |
| | AGTGTATTATGCCTTTTCTTAGGCTATATAATTTATGAAAACTTTATTTCT |
| SEQ ID NO: 262 | ATGTTCACAGTAAACACACGGTTTTAGGAACTTGAAGAACGTCCATACATAGAACCCAGAC |
| | TCTTAACTCCAACACAGATCACTAAAGCTTTGGACTGAAAAGCAAGGAGTGCACAGGCCGA |
| | GGCAACTCTACCTGGGGGAGGAACACTTCCATGACCCCAAGGCCGGGTGAGCCTGTTGGTT |
| | CTGGCATTCATTGGTTAGTCACCTGATGTAGATGTTCTACTCCAGAGGTGGCAAGCGTGTGG |
| | GACATTTGTTAACACTCCCACCTCCAATACTTACAACAGACATCAATAATGGATC |
| SEQ ID NO: 263 | AATGAATATATAACAACCATAGAAAAATGTAGAAGTTTTCCATGTAGAAAACATATTCTAA |
| | TCACAGAAAAACTGTAGAAGACACTGTGATTGGTCAATTCAATATTTATCACTACTTTCCGT |
| | TCATTTCTAAGGACACTCCTGTGTTGGTTGGTTAGCTACATGTCCAGCTAAAAGTCTCAATTT |
| | TGTAGGCTTCCTTTCATCCAGTGGTGACCTTTTGACATAGTTCTGGCCAATGAGAATCTTAAT |
| | TTTCTTGGGTGATGCTCCTAGGAAAACTGCTGTTTTCAGATCAAAAGAAAC |
| SEQ ID NO: 264 | GAACATTTTTTCTAGTTTATTATATATTTAAATACATTATAGTTTTAAAAGCAAAATGTTATA |
| | ACATGCCCAGAGTGGTATAAGAATAAAATAACGTTTCAATAGAAATTTCCTCTCTTTGAACT |
| | TCAATTTATAGACAATACATAAAGCTAGAAATATGTTGAAACTTTCTAATAAAACTCAATGA |
| | ATTTTCTCTTTTAATCAGAATTATTAAACGAAACAATTCAAAATAACTAACATGTTATACAA |
| | ATATAATAAATTACACAGTGGATTTTTAAACTTGTACAAATAGTTTATAAC |
| SEQ ID NO: 265 | CATTCATATGTAAGTAGATATACAGTTGACCTTTGAACAATATGGGCTTGAATTGTGTGGGT |
| | CCACTTATACACAGATTTTTTTCCCACCTATGCTACCCCAGCACATCAAAACCAACCCTTCCT |
| | CTTCCTACTCCTCAGCCTACTCAGCGTGAAGACAAGGATGAAGACTTTTATGATGATCCATT |
| | GCCACTTAATGAATAGTAAATATATTTTCTCTTCCTTATGATTTTCTTAATTTTTTTTCTCTAG |
| | CTTACTTTATGGTAAGAATATAGTGTATAACACATATAACACAAAATAT |
| SEQ ID NO: 266 | TGCATACATACTTCCCATGAACTCTCTTACTGGAAGATATTCCCAGATGCCTGCTATATTCTG |
| | TGAACTCTAACCCTAGAAAAATAAAATATTTTCTTTTATCATAGTTTCATTTTCTTTATCAAG |
| | GTTAAGTTTCATTCATATTTTGCCATCATACTAAAATATTCCCAACTTAAGAATGTTTTTTCT |
| | ACACAGTTCTTGTCCTCCTCCCGCTCAATAGTATTATAGTTTTTTTACGAGATAAGGTACTTG |
| | ATTCCATTCATTTCTTAAATTTTCTTTTTTCAAGGAACCTCATGTGTA |
| SEQ ID NO: 267 | TTTGCAGAGTATTGAGGTGGCACAGGGCATCACACGGCAAGGAGAATGAATGTGCTAACAT |
| | GCTAGCTCAGATCCCTCTTCTTATATAGTTACCAGTCCCATTACCTGATAACCCATTAATCTG |
| | TGAATGGATTAATTCATTCATGAGGGCAGAGCCCTTATGATCCAAGTGCCGCTTAAACAGG |
| | CCACGTCTCTCAACACTATCACATTGGGAATTACATTTCAACATGAATTTTGGAAGGAGCAA |
| | ACATTCAAACCATACAAAATGGAAAAATAAATCAAAATAAAATAAACCTCCTT |
| SEQ ID NO: 268 | AGTTGCAGGCACATAATATGCACTAAAAAATGTCATTTCCCTTACTTTGGTCAAAATCCATT |
| | AACGCATTCTGTGTAAGTGTGGAGTCCTTATCATGGCATTCATGATTCACTGTAATCTCAAA |
| | ATCAGTTACCATTTTGGATTTACTTTCCTTATATGCCCCCTACACTCCAGTGAAATGAAACCG |
| | TATCCACCATGCAGCCATTGATGCAAGCATGTCAAGAGAGGGAGACTTACAAGAGTAAGCA |
| | GTAAGGATTCTGAGAAGCTGATATACCTTGGTCAAATTAAATTTTATCAGGA |
| SEQ ID NO: 269 | TCCGTCCTCATCCTTTTTTTGCTCTACTAACTTGTAACTCTTGATACATAAAGGCCATAACTT |
| | ACTGCAATTATTAGAGAATACCATCTCCCAGATACTTTCTTCTGCATGTCACAATAGATCAT |
| | CTCTTGAAGTATGCTGTTCCTCTAATTAATCTTCATATTGTTTTTTGTTTTTTTGTTCTTCAAT |
| | ACTTGCTTGGCTCCGTGGTTTTATTTTTTCTTAATACTCATATTTGAATAATGTGAGATAATG |
| | ACACTGGGGTAAATATTTTTCATAGGTAAGAGTCAAAAGATTGCCTTT |
| SEQ ID NO: 270 | CTCTCAAAGAGTGAGGGGTGTATACTCACTGCCATAAATCTAACAGTACTGGTCATAATTTC |
| | AAAGGTTTCATATATTTATCTGAGATGAGTACATAGCTCAACCTCTTTGTCCTTACTCAGCTT |
| | TTTTCTTCAATTTATGTGGTACATTTCAGAAAACACTGTACACATGACAAGATATCCTACCC |
| | CATATGTCTAAAATTACATGTTAAAATAAATAAAACAATTGCAGTGCTTTGAAAACTTGATA |
| | ATCTGGTGCGTGTCCTTCCAAATTTGATTTACCTAAACTAGACTACATGCA |
| SEQ ID NO: 271 | ACTGATACATCTTTTCTCTTACATCACAAAATATTGTGTCTCCCCTGTCATCTCTCAGATGTA |
| | TCCTTCCACTTGTTCTCCATCCTCAGAGATGCTGTTCCATCAATCATTCTGTCTCTCTTATATA |
| | TCGTGTGTATGTATGTATATATATGTGTGTGTGTCTGTGTGTGTATGTATATATGTGTGTGTA |
| | TATATATACACACACATATATTTTATATATATATCCTCAACCTTTCCTTCATTCTGCATGTAT |
| | CTTTAAACCTTTCCTTCATTCCATTTAGTATAAAAATTTGTTTAAAG |
| SEQ ID NO: 272 | AAAGTGGGTGGGGTTTGTGTTGATGAAGTCACAGACCTATCTTCACCGCAAACCTTCCCAGG |
| | GTTCATCCCATAGCTAAGACCAAAGTGATGCATGTCTACCCAGGGGCAGGCAGAGGACATT |
| | TGCCCTTTTCTCATTCACCTCTCCCCAAGAGGTGACTTAGGAACTTCCCTAAGAAGTTTCCTA |
| | GTCAAAACTTCTTTCTTGGTGACGACTGGTCACTGTTTACAGCCCCTTGTTTCTCTCCTCTAT |
| | TGGAGTGGTTAGTCAGTCGCCTCAACCCTACTAATAAAAATAAACCAGGTG |
| SEQ ID NO: 273 | GCTATCCATTTTGGGGGCGATATCTCTTGCCTGTTCTATCATTCATTACATGCACTCAGTTGA |
| | AACAACAATTTTAGGCTTCTGGAGCCCAGGTCTCCTCTATCAGGACTAATTCTGAGTGCCAA |
| | GATCAATGACCAACATCAGAGGTAGTGGAGTGGTTAGGTGCATGGCCTTTCTGTCTGGCAG |
| | ATTGAGTTTATGTCTTGGTTATGTCATTTCCTAGCTGGGTGACCTTGGTAAAGTCACTTAACC |
| | TCTCTGAGTCTTCAATCACTTGTGAAATGATGATAATACTACTGGCTACCA |
| SEQ ID NO: 274 | AATAACTTATGGGAAAAGCTTTTATACTTGTCACTCACTTTTTAAAATATCCCGAGACAGTT |
| | CACTGTTGCAGACATTGAAATTGGCCATTTGTAAGATAAAAGGTATGTTTATAAAATCTCTT |
| | TATATAATATATGCTATCTATGACATGCAAAAAAGAAAAGTCTGGGTGCTGAGGTGCTGAA |
| | TTTTTCATTAGAAAAACATTTGTATAAACTACTATTATATAAATATAAGCATATTTATTACAG |
| | CAAACATTTTAATAGCAAACAAAACAATTGATCTTAAAAATATATGCAATAT |
| SEQ ID NO: 275 | GCTATTTGGGAGGCTGAGGCACAAGAATCGCTTGAACCCAGAGAGTAGAGGTTGCAGTGAG |
| | CCAAGGTCACACCACTGCACTCCAGCGTGGGTGACAGAGTGAGATTCTGTCTGAAAAAAAA |
| | AAAAAAAAAGATTTAGTAGTATATAAAAAAAAATATTTAACTTCCCTATTAAAATAAAAAT |
| | GCTTTCAAGATTGGGTAACGAAGTAAAGTTCATCTTGGGCACTGTGACTAAGAAAGGATTG |
| | GAAAAAAAGAAGGTCATCAAAGGTATATCAGGCAAATGGGAACAAAAGAAAGCAGT |
| SEQ ID NO: 276 | GCTGCAGCCCTCACCAGACAGCCAAACCTGCCAGCGCCTTGATCTTGGACTTTCCAGCCCCG |
| | ACAACTGTGAGGAAATACATTTCTGTTCTTCTTAAATTACCCAGTCTTGGGTATTTTATTATA |
| | GCAGCACAAATGGGCCACAATCTGCCATAGTACCTGTCATGTAGGAAGTATTCTGAAACTA |
| | TTTATGGAGTGGGTTTCATTAAAAGTTACTCTAATCTTTGAAATAGAAAAATATCTTACTTTT |
| | ATGATCAATGTTTTGTTACAAACTGTCTCAATTATAGAAACAGGCTTTTGC |
| SEQ ID NO: 277 | TGCTTTCTTCTACTATTTTGGGGTTTTGATTTCTTACATTTGGAATTTATCCAGGTGTAAGGT |
| | GTGAGGCACGGATCCAACTTTATCTTTTCAAGATGGCTTCTTCTGTGTTGATTCAACACCAC |
| | CGATCAAATAATCCACTTTCTCTTTACTCAATTGGGATGGCATCTATATAATGTATTACATTC |
| | CCAGATGTGTTTCAGTTTATTTCTGGATTCTTTATTTTGTTCCATAGACGTGTCTGTCTGTTCT |
| | GAGGCAGTACCATACTGTTTAGTTACTGCCATTGTAGAATATAGAGTT |
| SEQ ID NO: 278 | GTAAATATGAGAGTATGTGACAGAGACACTCTAGAAATAAGCAAGTCAAGGTTTAGTGGAA |
| | GTCTTGCTCCATTTGGGATACTTATTATCCTAAGTCAACAACTGATGGTGCCCTGGAGTCTCT |
| | TTTTATCTAAGACTTCTTAAATAGATCCTTCTCTGCTACTTAGTATAAGAAAGGAAGTTAAA |
| | TATGTCCAATAAAAGTATACTGTGGTTTTGGCATTTATTTAAATGTATAAAAACATGTACAC |
| | ATTTATTTAAATGTATAAAAACATGTACACATTTATTTAAATGTATAAAAAC |
| SEQ ID NO: 279 | TTTGATCTTCTGTCTTGATACTAAAACTTTCTGCATATTCGTATGTTCACTGGAGTAGGATTT |
| | TAAATTTCCCTTCAGAACTTTTTCTTTGCATTCACAACCTGGCTAACTGGCATAAGAGGCCT |
| | AGCTTTAGGCCTATCTTGGCTTTCAACATGCCTTTCTCACTAAGCTTAATCATTTCTAGTTTT |
| | TGATTTGAAGTAAGAGACATGTGACTCTTTTCAGTTGAACACTTAGAGGGCATTGTAGCATT |
| | ATTGACCTAATTTTAATAGTGTCCCAAGAAAATGGGAGACAGATGGAGGA |
| SEQ ID NO: 280 | GAATTCTGACTCTGGTTAGTTATGTGGCCGTGGCCCAGTATGTGATTGCATATTGATGTTGA |
| | ATGAGACACAAATTTAACCCTCAAGGAGCTTATACTTAAACAGAAAAGGCAGAGTCAGGGG |
| | TTGGAGAGATAGTTTGGCTTCAAGGAGGAAGCACTATTTAAGCAAAAGCTTAAAGAACAGA |
| | TTAAGTTTTCAGGCATAGAAGGAGGTGGAGTGACATAACCAGAAGCCCCAGCTGAGTCATA |
| | CCTGGAAGACAGACAAAAGTTTATATCAGATGGATTGAAGGGTATGTAGGAGAAG |
| SEQ ID NO: 281 | GCGGCTCTAGCGCGCGGGAGCTGGGCGAGGCTCCGGGACGACCTCACCAATGGAGACTGCA |
| | GTATTTAGCATGCCCCACCCATCTGCAAGGCATTCTGGATAGTGTCAAAACAGCCGGAAAT |
| | CAAGTCCGTTTATCTCAAACTTTAGCATTTTGGGAATAAATGATATTTGCTATGCTGGTTAA |
| | ATTAGATTTTAGTTAAATTTCCTGCTGAAGCTCTAGTACGATAAGCAACTTGACCTAAGTGT |
| | AAAGTTGAGACTTCCTTCAGGTTTATATAGCTTGTGCGCCGCTTGGGTACCTCG |
| SEQ ID NO: 282 | ACTACAGTCAACTCTTTTGAGATGGAGTCCAGTTTCATGCCTAGACTGAAATTCAAGATTCA |
| | TAATGAAGAATTCACTTTTATCAAGCATTGACAGGAGTTAGACACATCTCAAACCATATTTT |
| | AAAATACAGCCAGATTACAATGTTACCTGATTCTGAGACTGCCTGTAACTTGATTCATAATA |
| | GTGACAGACAGCACTTGGACTAGGACACTAGAGCTGCTGAGAAGGAAAATTGCACCCAGCT |
| | TCTTTGCTTCCTGCAAAGATGCACCAGGATCAGAGAAGAAAAGACCAAGTTCT |
| SEQ ID NO: 283 | TTCTGTTCAGGTTTTTGACATCATTTATTGAAAACACTTTTCTGACTCTATGGAATTGCCTTA |
| | AAATCTTTGTTGAAAATCAATTGACTAATAAGCATGAGTCTATTTCTTGACCTTTTTTCCTGT |
| | TGCATTGGCCTGTTATACATCTCTATGTTAATAAATACCACACTAACTTTATTGTTATAATAT |
| | TATACTAAGTCTTGCAGCCAGGTAATAGCATAAGTCCTCCAAGGTTTTCTTCTTTTTTGAGAT |
| | TGTTTTGGCTATTCTAGATCTCTTGCAATTCTATATAAATTTTAAATC |
| SEQ ID NO: 284 | AAAAGTGCTAATATAAAATATTCTCTCACAAAAATAAAAACTAACTCAAATGGCTTTTAGTT |
| | CTTGTGAGCTGAGATAACCTTCAGTAAGTAAAGCTAGTTTTTAAAAATGTTGATAAAATAAA |
| | AACAGAAATGTCTTCAAAATTGTCAGCATTTACATTATAAGTGTGCATTTTTAAACCTAGAT |
| | TTAATATCAAATGAGCTTGTTATCTCCTAGATATATGAGATCATAAAGCTATAAATCCTGTC |
| | CTTGGCTAGTTTTAAGGAGCAATTCAAGCATAGTTATTATGAATGAGTCATT |
| SEQ ID NO: 285 | CATTTGGGAGCTGATTAGGTCATAAGGGCGGAGTCCTCATAAATGGAATTACTGTCCTTAGA |
| | AAACAGACCCCAGAGAAAGCTCTGTTTTAGTCTGTGAGGACACAAAGAGAAGATAGCTATG |
| | AATCAGGAAGAGGGCCCTCATCAGACACTGAATTGCAGGCACCTTCCTCTTGGACTCTCTAG |
| | CCGCTAGATTGTGAAAATAATCAGACGTCTTCCCTAATCACCTTAATGTAAACAGGTCCAAT |
| | TCTAATTGGTCAATATTCTCAGCACTTTATTGCTTTCAAAATAGTATAAACGA |
| SEQ ID NO: 286 | AAAGTGTAGAAAGTACAATCACCCTGTTTGGCTGAATCAATCATCATTGTAGACCATGGAC |
| | AGTGCAAACCACAAACAATAATTTCCTGCTGCTAGAACTTGGCTGATGACCGTAACACCTTC |
| | CAGTGAAAAATAATCATTCACCATTACAATAATCAAATAATCATTTTTAACACCACATTCTG |
| | AGAATTGTACCCTAACAAGTTCTTTGAGATAATCATTCTAATATTTACTTCAATTTATTTATA |
| | ATTTAATAAACAAAATTTATTCTAGTTAATTGCAACTGCCAAAACCTGGCCT |
| SEQ ID NO: 287 | TCTCAACCTAAAACTTGGAAGAACCTGAAGTAAATGGTCAAGTCAATGGATTTCTTTTTAAT |
| | CCTACAAAAGTGAACTCTTGCACTCAGTAGAAGCCCAATAAATATTTGTTGTTGAAATTACA |
| | ATATACTATACCGAAAGAAGTAACCTAACATTGTAACAGAGAACAATAGGATTTTGTTATC |
| | TAGGTAAGGAAGTTAAACATAACAGCAGGTAGCACAAAGGAATCAGCTTAGCAATAATAA |
| | ATTTCAGATTATGAGGAATAGAAAACATTACAATTACATATAGAAAATACAAAGC |
| SEQ ID NO: 288 | CCCCGGTGTGAGAGTCTTAGGTTTAGGGAAAAATATTACAAGTTTATTTAGTTCTCTTATTTA |
| | ATTACTTAAAAAAAAAGATTACATGCTAAAATATGTTAAATAAAAATATAAATATAAACCA |
| | ATTGATTTATCTTTCCATAATCTTAAAACATAACTAGAGTAACAAAATCAAGAAGTGCAAA |
| | AAGATAAGATTGATAAATGTTTAGATACTAAAACAACCACTTCAAGTGTTATAAAAGAGTT |
| | ATGTAGAGAATTACTGAATGTAGAGGAGAGCATTTACTTCAAAAATGTTGGAGC |
| SEQ ID NO: 289 | TGAGTATCTGGCAGATATTTTCTCAAAAAGGAATAAAATGAGTCTGTCACTTCAGGTAAAA |
| | CGATTTTCCTGAAGTATCTGTTGCCAAATGACTAAATTTGAGCTTTTAAGTAAAAACTAGTA |
| | TTTTGAAAAACTTCTATCTATTACCAATGAGCTTTGACAGCCTCCCAATCCTCGTGGATAAA |
| | GATCCTTTCCGAGTATAAGACAATCAATGGATTCTTTTTGTAACAAGTACAAAAAAAATTCA |
| | CTGATATGATTTCAGATTCCACATTGAAACTAGACTTTAAAAAAACTACCACT |
| SEQ ID NO: 290 | GGGAGGAGGGTATCATGAGGCGTGTCCCATATGGCCTGAACTGGTTTTTCAGGTTTCTTTGG |
| | GTCCTCTTGGCCAAGAGGAGGGTCTGTTCAGTCAGTTGAGTGGCTTGGAATTCTATTTTTTT |
| | GGTTTATAAGACCATGGTAATTTCTGTATTTAGTCAGCATTTAATCACTAAAACTTAATCTTA |
| | GTAGACATTTTTTAAAATGCTGAACTAAAGTGAGATTTTCTCTTCCTTAAAAATCTGGGATG |
| | CTCGTTCATTCTCTGATCAGTTCAGATGCAGTGTATGAAGAACCATAAAGC |
| SEQ ID NO: 291 | ACTTGACATTGTCACTTTCGGTGTTATCTTCATTCTGTTATAAGAGAAAACTTTCGCTAATAG |
| | TTAAATGCTGCCAGGTGTAAATTAGTGTCATCAGTTGCTTCAAACAGAAAATAAGCTCAGTT |
| | AATTTCAAAATTAGTTCAAAGATTTTTTATCTGATTTATGAAATAAAAGAACTATTTTGGAA |
| | ATTCATTCATTCAAAGGTACAATATAAGATATTTTATGAAATTTACTTAAAAAGTTCAAGAA |
| | TAAACATCATGGTAGAACAATATTTTTCCTAAATTAAGAAAATGGTGAAGC |
| SEQ ID NO: 292 | TTCATTGTCTCGAATTCTTACCAAATGATTTTGGAGAGAATTGAATTGATAGAATTGATTATT |
| | AGAAAAATGAGTTGAAAACAAACTATTTAGAACCTACCTCTGTTTTTTATGCATAAAAAAC |
| | AGTATCAGAATATAATGAATATAAGGCTAATGAAGAATGCATGTGTAAGACTTGCTTCAGC |
| | AAAGCTAAGGAATGTTAAGACAAAATTTCTCCTACCAAGTCTGAGGAGCAAGAGATTAAAG |
| | GATCTGAGGAGCAAGAGATTAAAGGATCTGAGGTGCAAGAGATTAAAGGAGAGA |
| SEQ ID NO: 293 | GGATTTGGGATTCACCAGGGCACAAGGCGACGTGCCTCTCTCCTCACGGACCCTAAGCGCT |
| | GGTGGACAATGCAGATGTCAACCGCAAATGATGAGGCACTTGCAGGTAGCGTTCAGCACCA |
| | AGAAGGAAATGAAGGGTGCGTGTCGCTGACTGTGACTCTGGTGGGGGCAACTTAAATAGGG |
| | CCATGGGGGAGGGCCTCTCTGAGGAGGTGACATTTGAGCTGAGGCCTCACCAGTCAGAAGG |
| | AAAAAGCTGTAAAGGGTCTGGGATAAACTCAACCTGCAGACTTTTAAAATAATATA |
| SEQ ID NO: 294 | GAAATCTGTAGGGCAGGCAGTGAAGATGGGAGGCTGGAAGCCTCAAGCATAAGTTGAAGC |
| | TGCTGTCACAGGCAGAATTTCTTTTATCGTCAGGAAACTTCAGCTCTGCTCTTCAGGCCTTTC |
| | AACTGATTCAGTGAGGCCCACCCAGATTATTTAGGATAATTTCCCTTACTTAAAGTCAACTG |
| | ATTTTGAACTTTAATCGCATCTACAGAATACCTTCAAAGTGACACTTGGATTGATGTTTGAT |
| | TAAATAACTGGGAATTGTAGCCTAGTCATGTTGACATATGGAAGGATCACCAT |
| SEQ ID NO: 295 | CCTATTTAATCAGAAACTCTGGACTTGCAGTCCAGCAGTCTGATTTAACAAGCCTTTTGGGT |
| | TCTCCTAATCCCACTGATGTTTGCAAATGACTGACCTAGGTCTTTGGTCCATTTTAGGTTTGA |
| | TTTGTTGGCAAGACTACTTCATAGTAATGGTGTATTCTTTTAAAAGGCATATAGTATCTGATT |
| | ATCTTTTATTTTATAACCAGCCATGCTCAGCACTTAGATCCATGAGGGTATAGTAGAAATTG |
| | CAAAATGGAGATAGCGTATTGTCCCTTCTTCACTTATTACCTGAAACACA |
| SEQ ID NO: 296 | CCAAAGCAGAGTTCACCCCCGACCATTTCAGAAGGTATTTCTGAAAAGGAGCAGATAGAAC |
| | GTAATTCGGAGTCACTCACCCAGGTGAGAGGGTTGGCCTCAGGTCTAAAGGCAGGAAGCGC |
| | TTCTCTGTTTATAAGACCTAATTTTACAAATCCATTCAAAGCTTTCATATATCCCTGAAACAA |
| | GAATTAATAAGCAGTATATAAAATTTTTCTCTTCCAATGAAAAAACTTAAAATATTTTTGAA |
| | AAGAGGGATATATCTTTGTAACTAATTTAGAAAACTGTTTATATTGATGATAT |
| SEQ ID NO: 297 | TCAGGCCGGCCATGAGACCGGGAAACCCAAAGCGCGTGAGGACGCGAGCAAACTAGGCCG |
| | GCGCACGCGAGCCGAAACGCTGGCTTTGGTAGGACAACCAAGCTCACACGCCGAGAGATTC |
| | CGGAAGTGCTCGTTGCCCAAAAGAGACCGGAGGAAAACATGGTCGGGAGGGGGATAAAAG |
| | GTTCCGGAATGAAAAAATAATGGCGCCCCGGGGCGTAGCTTCTGGAGCGGGGCTCCGCCCC |
| | CTGCCCTAGCATCGCCCTCGCCACTTTTGTGTAAACTTGGCATCAATAATTTCTACCC |
| SEQ ID NO: 298 | TAAATCTAAAGGTTTGATGAATTCAATTTAAACCTTTTTGGCTGCAGTATGTCCTAGGTAAT |
| | CTTGGGAACTGTACATTGCCTCACATCAGAAGGCAAGATATTTGGTTAAACTACCAGAACTT |
| | GTAAGATTGATCAGAGTTTGGAAAAATTTATTTTGGAGAGCTTTTTTATTGTTTTGTATTTGA |
| | CCATTATTTCCATAATTGTATTTGAGAATTTTTGGTAATGACTTGTCTTTGCTGTGTTTGTAA |
| | CCTGCTTGAATTTTAAAGGATGATGCAGTAAAGAGTTCAGATAACTCTAC |
| SEQ ID NO: 299 | AGTAGCTGGGATTACAGGTGCCTGCCACCACACCGGGCTAATTTTTTATATTTTTGGTAGAG |
| | AAGGGGTTTCACCATGTTGGCCAGGCTGATCTCGAACTCCTGACCTCAAGTGATCCGCTCAC |
| | CTTGGCCTCCCAAAGTGCTGACATTACAGGCTGACACCATGCCCCGGCCCCTTCTTTTGAAT |
| | TTTGAGTGACCACAGGCATTGATGATAGAATGTGAATACATTTGATTTGTATTCATATGGAG |
| | GGAAAGTGCCTCTGACCTGTCCCCATGGAAGGAAAATAAGATTGGCCTGGAG |
| SEQ ID NO: 300 | TCATAGATCTAGGAAGCTCAGAGAACACCAAACAGTATAAATATAAAAATATCTACATGTA |
| | GCCATATCGTATTCAAACTGCAGAAAATCAAAGACAGAGAAAAGACTTCAGATAGACTCAT |
| | CATCATCATCCTTCAACAGTCACTGCATGTGATGTTGGATGATTTCCTCTTGGGGTTGGTTGG |
| | TCAACCATAATGGATATCATAGCCACAATCTTACCATGCCTTCTTCATCTCTGACTCTAAGG |
| | AGTCACCTTCCTTTCCACTGTTGCCTGGTTCTGTAGTCTGTAACAGATTCATA |
| SEQ ID NO: 301 | AGAGTGAGGAATATAAGGAAATACCAGTAAAGAAAACTTAGGATTCTAAGTGACAGCAGG |
| | TATCTTAGTAACTGGTTGGTGATCACCTAATATAAGATAACCACAGGTAAGATGGGTAAGA |
| | CCTATTTTAGAAACCCATAAATTTCAGGGGCAGGCAGGTAGACATACTGTCCTGGTACACAT |
| | TTGGAGGAAGGATTATTTTTCTGAGCAAAGAAAACGATCTGTTCCCCTACTCATGTGGGCTT |
| | GTATTCATGCATATATTTACTTGTTAATCCATTCCTTCAATAAATGGGAATTCAA |
| SEQ ID NO: 302 | CTGTTTATGAGTTAAACTAACATTGTAGCTGGTTCTCTGAAGAAAAAAATACATAATTTAAA |
| | ATACAAAAACCACTTCTTAACAAAAAAGTGACAATGAAATATATAGAGAACAAGAATATTA |
| | ACAAAAATAAAACGAACATTAGAGAACACATAAACTTCATACAAATAAATCTCAAAACCTG |
| | GATGTAAAGAATAATTTTCTAAAACTCATCCAGAAGAGACAGAACATTTATCTCTATCTACC |
| | AGCACTACTAATTTTTAAACTGTACTGAAACTACAAGCTAAAGTAGGTAGAAAA |
| SEQ ID NO: 303 | AATGGAAATTATCTCAATGTAATAAAGGCCATATATGAAAAGCCCACAGCTATCCTACTTA |
| | ATTGTGAAAAACTGAAAGGTTTCCCACTGAGATCAGGCACAAGGCAGAGATGTCCACTCTT |
| | ACTTACTTTTATTCAACATAGTACTAGAAGTCCTACCTAAAGCAATTAGGCAAGAAAAAGA |
| | AATAAAACGCATTCAAATCGGAAAGGAAGAGGTAAAACTGTCCATTTGCATAAGACATAAT |
| | CTTAGATATAAAAAACCATTTAACAGTTTTTTAAAACTGTTAGAACCAATAAATTT |
| SEQ ID NO: 304 | ATAAAACTGAAAAGCTATTAAGTGGCAAAATAGGTAAAATTTCTCTGAAATGAAAAAAGTG |
| | AAATGGCAAAAATATAGCAGGCATCCAAGCAGAACATTCATGTCATCAAAAGGAGAAAAA |
| | TACCAAGGTGCCCTTGGATTTCTTCCGGCAATATTCAGTGCTTGGACTTAATAGTGAAGTGT |
| | GTTCACAAATCTGAGGCAAGGAAGGCATGAACCATTAATAACACTCCCAGAAAAGCATAAA |
| | GGCAACAGTCAGACACCCGAAGCATGAATGATTTCAAGGATTAAAAAACCAACTAG |
| SEQ ID NO: 305 | TGGCTCACGCCTGTAATCCCAGCACTTCAGGAGGCCAAGGAAGGTGGATCACAAGGTCAGG |
| | AGTTTGAGACCAGCCTGACCAACATGGTAAAACCCGTTTCTACTAAAAATACAAAAATTAG |
| | CCAGGTGTGGTGGCACATGCCTGTAATCCCAGCTACTCAGGAGGCTGAGGCAGGAGAATCA |
| | CTTGAACCCAGGAGGCGGAGGTTGCAGTGAGCTGAGATTGCATCATTCATTGCACTCCAGC |
| | CTGGGCAACAGAGCAAGACTCTGCCTAAAAAAAAAAAAAAAAAGACAGTACATGGG |
| SEQ ID NO: 306 | AAACTTTTCCAAATTTGATTAAAAGGATAACATATTCTAAAGGTATTCAATATTTTTACTTAT |
| | CTCTGAAAAACTTAATCACATAAAAGCATACATTTTACACATACAGCTCTCTCCATCTTCCA |
| | CAATAGATTAAGACATAAAACATAACCAGTATTTTTGAAAAGCCCCCTTAACTGGCATGCTT |
| | CTTACTGAAATTATCATAAAAGGTTCGTATGAGAAAGGATTCCAGAATATCCCTTAATTGTG |
| | TTGTAGCTTATGCATTTCTATTTATTTTATACATTATTTAATTCATGTGAG |
| SEQ ID NO: 307 | AGGTCAGGAGATGGAGACCATCCTGGCTAACATGGTGAAACCCTGTCTCTACTAAAAATAC |
| | AAAAAATTAGCTGGGAGTGGTGGCGGGCGCCTGTAGTCCCAGCTACTCGGGAGGCTGAGGC |
| | AGGAGAATGGTGTGAACCCGGGAGGCGGAGCTTGCAGTGAGCCGAGATCGTGACACTGCA |
| | CTCCAGCCTGGGCAACAGAGTGAGACTCCATTTCAAAAAAAAAAAAAATCCATATATGTGA |
| | CTGTAATAGTTCTTTGTTAATATAGCCATAAGAAATTATTTACATTAAAACAATCAG |
| SEQ ID NO: 308 | GATGTAATACTGCATCTTTATGTTTGTTTCCATTTCTTTTGACTGCGAATGGTGCCATGTACA |
| | GTCCGTGTTTGTGTGTGTGTAAGTTTCGTTAACTTTTAACTTTATATGAAAGATTTGTGTATA |
| | TTTTATGGTAGTCAATGATAAAATAGACTAGTGTCTACATACATTTTATGCATTCATGACAT |
| | ACCTTTTTCTTAATTTTGATATTTCTAGGCTGCACAGTTCATCTTTGAATGTTTTCAAATTATT |
| | GCAAATCTACAAAAAGTTTTTCAATATATGTATTGAAAAATATCCATG |
| SEQ ID NO: 309 | TCCCAACTAAAAAATGGGCAAACTATTTCAATAGACCTTACTCCAAAGAAAATATGCAGAT |
| | GATCGGGGAGCATATAAAATGATGCTCAAAATCATTAATCATTAGAGAAATGAAAATCAAA |
| | TTCACAATGAGATACCACTTTACACTCACTAGGATGGCTAACATCAAAAAACTGGAAGATA |
| | ACAAGTGTTGGTGAGGATGCAGAGGAATTAGAACCCTTGGGCATTGCTGTTAAGAATGTAA |
| | AATGGTATTCCTGCTCTGGAAATTGATATGATAGTTCTTTAAAAAATTAAATAGAG |
| SEQ ID NO: 310 | CCTTCCTTCCTTCCTTCCCTCCCTCCCTCTCTCTCTCTCTCTCTCTTTTTTTGGTGCATCCATAC |
| | TTTCTGGCACTATAAGATGCTTAGGGCTTATCTTGTATATTTCCAGCCCCAGTTATAGAATCA |
| | GCCATTTCTTCAAGGATCCCCTGTCATTTTACTGGAGAAAGGACTTAGAATCCAAGATCTGG |
| | GTGCTAGATGTGCTTGAGGTGTTGTTTCCTCCAGATCTTCTCAACTGACAGAGCAGTGAAAT |
| | ATATGTGTGTAGGGAGGATGGGGAGAACAATTTTTTTAACACATATGA |
| SEQ ID NO: 311 | TAAACTCAAACATCGCCTAGAACTTGAAAGAGCTTTCTAAATAATTAAATATAAAATTCAAT |
| | TCAAATTATATTCAGAGTATTTTCCATGTTAAAATTTTTGTTTTTTTTCTAGTTTATGGAATTG |
| | AATAATCCAAGTAAAATTTTCTGTAATCTCTTAGCTACTATAACATTAGATTAATTGAAACA |
| | GTCCATTCCCCAACCATTTGGGATAAACTGAAAACTGCCATAACATGATACGCCTTACTATT |
| | AGTACATATTCAAGAGACTTAAAGCACACAAGATTTGATCATGTTATAAA |
| SEQ ID NO: 312 | AGATTTTCAGATCAATCATATTTTGTTCAATGAAATTTGCATATAGACAAATAAACTCTCCC |
| | AGAAGAGTTTTACTTATCAAAACCAACAAACTCTCCTAGAAGTTTATTTGTTCAAACTGCAT |
| | TTTTACAAGGACACTTCCTAAAAATTGTAGTGTGGTCCAAGAGGTTATGCATATGTAGGGGT |
| | AGGAAAAACCGTGACAGTCAAAGGTAAGGTTCCAAAATACAAGTCTCCTCTAAAATGTCAA |
| | TAAACACACAATGAATAACACAGAGGGATGACAAGCCATCTGAAACTACAAAT |
| SEQ ID NO: 313 | GGGGCTCCCATTGGCCAAATATGGAAAAATTTGAGAATGAAAATAAATATTGATAGAAACT |
| | ATTACCAGTTGAACAAAATAAACTATGAGTCCATAATGATATAAATAAATGGAATTTGATG |
| | AGTAGCAATATATTTACCTAATTTCAAATACTGCCTTAAGAAATGCTAACAATTTTAATGGG |
| | AAACATTAGAGAAATCCAAATTGTGAGACATTCTAGAAAATAACCATCCTGAAATCTTCCA |
| | GAATGTCAAGAAAATGTTCTCATCACAATTGAAGGAAAATAAAGAGAAATAACTA |
| SEQ ID NO: 314 | GCTGAAGTCTTTTTATGGGCACAGGATAGGGGCGGGGCAGGCCAAAAAGGCAACATTTGGG |
| | CTGAAAAATAGGGTCAGCTGTTTTCACTTAGGACAAACTTAAGGGTGGGGCTTAGCCAGGA |
| | TCCCAGCCTTTCTGTCAGTTTGACCTTAAAACCTGCAGCACATTATATAGCCTTACTAGGGG |
| | GGATGTGTGTGTGTACACACACTTTTTTTTCCCACATACTATTATTGAACATTTTAAAGATTT |
| | GTAGTTGGCAGACTTTTGACACTTTGAGCAAGTTAATAAGAAAGCATGTTTTA |
| SEQ ID NO: 315 | GGTCAGGAGTTTGAGACCAGCCTGGCCAACATGGTGAAACCCCATCTCTACTAAAATACGA |
| | AAATTAGTCAGGCGTGGTGGCAGGTGCCTGTAATCCTAGCTACTCGGGAAGCTTATGCATG |
| | AGAATCGCTTGAATGCAGGAGGCAGAGGTTGCAGTGAGCTGAGATCACACCACTGCACTCC |
| | AGCCTGGGTGACAGAGTGAGACTGTCTCAAACAAACAAACAAACAAACAAAATATATATAT |
| | ATATGAACATTACATATATATATTTTTCTTTATGGGCTATGAAAGTATCATACTGT |
| SEQ ID NO: 316 | TAGATTGTGCAGTAAGATAATTGTCCATCTCCTCTCTGATTTACCTACTATAAGAAACACCC |
| | TTACACTCAACAGCCCATGGTACGCTAAACCCTCATGAATAAAACTAGGGCCTGAATACCT |
| | ATGGTTTACTCCAACTATAGGGGTGGGAGTAACATGAAGGGAAACCTTCCATAGCTGTCCA |
| | TGGATGAAACCAGCTGAAAAGCTCCCATAGAGGCCAGACAGGGAATTTCACAACTATAATG |
| | TGTTCTTCAGAAACATGCATGAGGAATTCTCTTGTAGTATAATTTAAATTATCTC |
| SEQ ID NO: 317 | CCAGTCTACTCTCACTAGTAGTTCACTTAGGTTATTATTTTCCCACATCCTTGCAAATACTTG |
| | GCCTTATCTGATTTTCTAATGCTTGTTTATCTCATGGATATCTAGTTGTAGTTTTTGAATTTGT |
| | TTAAATCACTCTTAGCTGATTTTTAATACATTTGAGCATTCTTCATATATCCTTTAGCCATTT |
| | AGGTTTCCACTTCTGCAAATTGCCTATATACATTCTTTGTCTATTTTTCAATTAGTTTTCCTGA |
| | CTCTTTATTATCGAATGATTTGCATATGTTTTCTTGTACATCCTAA |
| SEQ ID NO: 318 | AACAAACAAACAAAAAAACAACCTGTGGTTGGTCAAACAAATTTTGAACACCCGAGTCCTT |
| | ATGGGGTTAAAGTTTCTTTACCCTGGCTTTTCAATGAAGGAAAAATATATACTGAATATCTA |
| | GTCATATGCCAAAGCATGCTCCCTATGTTTTTCCATTTAATCTTAAAAAAAGAAAGACACTG |
| | ACAATAATAAGTGTCCTAATTTCATAAATGAAGAAACTGAGAGTGAGCATAAATGTAATTT |
| | AAATTGGAGATTCTAAGGAATCTTCGTAGCACATTATTATAGATTTACTTCCGT |
| SEQ ID NO: 319 | AGGCAGAGGTTGCGGTGCGCCGAGATCGCGCCACTGCACTCCAGCCTAGGCGACAGAGGA |
| | AGACTCTATCTGAAAAAGAAAAGAGAAAAAAAAAAGGCATCATTTTCTAGGTACCGTGACA |
| | GGGAATAGGTTGGGAAGCAATGACTTCAGGACAGGGGGATGTTGAGTGAATGGGGCTCAG |
| | CCCTGTAGCCAGTCAACATACAGAGGCTTAAAGCAAATTTCCAAAAGGCATCCCTTTTCCTT |
| | CAAGATACTACCACCCTCTATTGGACAACTGCCCTGTTAATAACTGTACAAATCTAT |
| SEQ ID NO: 320 | AAGAGGTGGGGGCAGGGTGAGATCCAGGTTTTGCCAGGCTTAAAGTTTATGCAATTTTGGG |
| | ATCCCTCTTTAAGAAACAGAATACAGAATTACAAATAATTTTGAAAATTAAGTCCAAGGCC |
| | TTGAAATGTGCTGGAGAGTGACCCTGAAGCTTAACTTCACTAGTTTCATGGTAAATCAACTT |
| | TGGGAGAGAAAAAGCTTCCCAGGAAAAGGGATGGCGTGTTCAGCGGGGCTGGAGTTTGGA |
| | GGGATGCACACTAGACCATTAGACTTGAGAATCCTGGGTTCTCATGCTCTGGTTTC |
| SEQ ID NO: 321 | ATCACGCCAGATGCATTCCAGTCTGGGCGACAGAGACAGATTCCGTCTCAAAAAAATTATT |
| | ATTATTATTATTGTTATTATTATTTTCCCTTGAGATGGAGTCTTGCTGTCATCCAGGCTGGAG |
| | TGCAGTGGCGTGATCTCGAACTCCTGATCTCAGGTGATCCAGCCACCTTAGCCTCCCAAAGT |
| | GCTAGGATTACAGGTGTGAGCCACTGCACCCGGCCAAAAAAATATTTCTTATGGCATTATCT |
| | GCAAAAGTTGAATATTGGAGACAACCCAAATGTCAATTAATAGGGGACTGAT |
| SEQ ID NO: 322 | TCCAGTACTGCTTATCCATGGATAATGAGGACCTCCTGTAGCTGTAGTCACTTTGGTGCATC |
| | GTTTCCAAAAACCTAATGAGTTGTGATGTCAATTGCAGCTGTCAATCTACTTTTAATCACAG |
| | GCCTCAAATGAAGAAATTCATTTAGAGGATAAGCAAATTACAGCTTCAGTTTTGTTCATAAA |
| | CTTAAGCCCCTTATTGCTAATTTTTTTGAAAGAACAAGTTTATGCTGATTTGTCCAAGGATAC |
| | TCAGCAAATATTTGGAAAATAGTTCAAAGTTTAATGTATAATCATAATCCT |
| SEQ ID NO: 323 | CTCATAAAGTTATTAGTGGGGAACCCATAGCAGGGAGAGGAACAGAGAGTGTATCAGACTT |
| | CAACATGTATGTTGTGACTCTTGTTACTTTAGAAGAAAATGAACCTCACTATGTAATAACCT |
| | AACTCTGTTGTGTTTATTCATTTTCTTTCTTTTTTTATTTTTATGTGTTTATTCATTTTCTTCTA |
| | AGTTCAAAGGTCATTTCTGGGTAGGAGAGCAAATGTCCTTATATTTTTTCCAAATAGACCAT |
| | TTGCTTGGTGGGCCTCACCCCGGTGGAATGGAAGTACATTGGCAGCAACC |
| SEQ ID NO: 324 | TATATATGTATATATGTGTATATATGTATATATGTGTATATATATGTATATATGTATATATAT |
| | ATGTATATATATGCGTATATATATGTGTATATATGTGTATATATATGTATATATGTATATATA |
| | TATGTATATATATGTGTATATATGTATATATATATGTGTATATATGTATATATATGTGTATAT |
| | ATATGTATATATATATGTGTATATATACATATATATATAAAATATAGAAAGCAACAAAAGTG |
| | AGATACAGTTCTTCCTCTTCCCTTTCTTTTTCTTAAAAGAAAATCTTTT |
| SEQ ID NO: 325 | AATCATACCTAATAAAGTTTTTATCAGTGTGTTAGATGGCCTTCAAAATATGGCAGAGAAAT |
| | CCATAACCAGGCAAAATAATTTTGGGTCTCATTTCTTCTTATAAGTTATTACTTGCCTATAAC |
| | AAACTAATCTAAAATATGCCTTTCTGCTCTAAAAGCTAAAGCTTAAGAGTCCCTTGGCAGAT |
| | GGGACTTTTAAATTATTCCTGTAGAAAATTGGTAGTATATAAGTGTTTTAATTTATTATGTGT |
| | TTTAATTTATTCCTGTAGAAAATTATTCCTGTAGAAAATCGGTAGTATAT |
| SEQ ID NO: 326 | GTAATCCCAGCACTTTGGGAGGCCGAGGCGGGCGGATCACGAGGTCAGGAGATCGAGACC |
| | ATCTTGGCTAACATGGTGAAACCCCGTCTCTACTAAAAATACAAAAAATTAGCTGGGTGTG |
| | GTGGCGGGCGCCTGTAGTCCCAGCTACTCGGGAGGCTGAGGCAGGCGACTGGCCTGAACCC |
| | GGGAGGCGGAGCTTGCAGTGAGCTGAGATCAGGCCACTGCACTCCAGCCTGGGTAACAGAG |
| | CGAGACTCCGTCTCAATAAAAAAACAACAACAACAAAAACAAAACAAAACAAAAAAA |
| SEQ ID NO: 327 | TGGCCAGTATTCTGCCTAGCCACATCAACAAATGTCTCAGATTCCTCAAAAGATTTTGACAT |
| | CACCAAGAGGGGCTTGGAGTATGTAGATGAACACAATGCCTTCTGGTTGGTCTTGTTCATAT |
| | TGTACATACATTTCTTAGGATTTTGCAAATATTCTAGTATCCAAAATGTTATTATCTGGCTCT |
| | TAAAATTTGAAGTCTTTATGTCACAAGTGACAGGCTAGAGCTTGTGCAAAGTGAATGACCCT |
| | ATGTGTAAAGTGTTTGGAATCAAGGGTGAGATGCCAGGCCACAATAAACTC |
| SEQ ID NO: 328 | TTCAGTTTCTGCCAGCATCGTCTGCATTCAAACCAATGACCTCGAGGTGAAAATCTCCAGAT |
| | AACATGATTGGTCCCCATGCTCTCATGATTTCCTTACTTAAGCAATTAAAGGCCAAAGCAAG |
| | ATGCTTAGTAACTCCTTTTCCACATAGAGGCACAAATAAAGGAAAGCTGGTCACAAGTTTTG |
| | AACCAAAGAGTTAAAAGAAGAATCATAACTTGTCTCTATTTAATGATTGGAAACTCTCACA |
| | GACTTCTGTGAAGTCTCTCCCCCTTTTGTACCTTTCTTACAAGTGATGACTAT |
| SEQ ID NO: 329 | CCTGAGATTTTAGGAGCTTTTGTAGAATTTCTGAATTTGTAGCTGGTGACTGAGTAGAGGAG |
| | CTAAGTTCCACTCCAGAGCTCCAGAGTGAAAGGTGTGCCTTAAAGAGGGGAAAGGGGAATC |
| | AATTTTCCCCTGAAGCCCCAGTACAGGCTTGTTGTGAGGATCAAAAGAGCAGGAGGGTATG |
| | TCCTGAGGTCCCCAGATGCATGTGTGATGCTGCTACTACAGGGGTCAGCTGTGCAGAGCAC |
| | CCCCACCCCCACCATTTCCATTCACACCCTTTGGGTTCTATAGAGTTCCACTCCT |
| SEQ ID NO: 330 | CCCTGGAAATTAGCGCCTTGAATAGGCACCCCTAGCAGAAGAGACAACAGGCCGCCTATAG |
| | TAAACTCAGAGCCCCAAATCATGTGAAGCAAGCATCAGCCTGAGGGTCTGTGAATCCCAGT |
| | TCTAGATCCCAGTTCATTAAGGATTTTCTTTCTGGCTTTGCAGGGAAGGAGTGTGGTTTCCA |
| | GGAAAGTCCCTGATATCTGGAGAAGAAGGCTCCATGTTGGCCCCAGAATGGCATACTCTTG |
| | GCTCCAAAGACATTAAGTCTTCATCTTCCCACACTAAGAAACAGGAAAATTTTTA |
| SEQ ID NO: 331 | TGAGCTGTGATCGTACTGCTGCACTGCAGCCTGGGCAACAGAGCAAGATCCCAGCTCTCAA |
| | AAAAAAAGTAACAGAAGAAACCTACGGACTCTGACTCAGAGTTGTTGCTCATTCAGCCCTG |
| | GTCATGGATTGAACAGTGTCCCCTGCCTCTCCTGAGAAAAAAAGAGTCCTCTTCTCCAGTAC |
| | CTGTGAATGTGGCCTTATTTGGAAATAGGGTTCTCGCAGTTGATCAAGCTAAGATGAGGTCA |
| | TTAGGGTGGGCCCTAATCCAAAGTAATTGTGTTCTTATAATAAGGACAAATTAT |
| SEQ ID NO: 332 | AGGAGTGCTTGGGTCTGGGAGGTTGAGGCTGTAGTGAACCATAATAGAGCCAATGCACTCC |
| | AGCCTCGGTGACAGTGCAGGATCCTATCTCAAAAAAAAAAAAAAAAAAAAAAAATTTTCAT |
| | CAATTAGAGAAAAGTTTCTGGGATTTAATTTATTCTGTTAAGATGCTCTCCTCCTCCTGGAA |
| | AGAAAGAGATAAAAACAAGTCTGGGAAAATGCTGATTGTTAAAGTTGGGATATAAGTACAT |
| | GAGAGTTCATTATACCATTCTTTCCAGACTTGGATGAGTATAAACATTTTTAACA |
| SEQ ID NO: 333 | GAAAGCAACCATTCATTCATTCATTTAGATTAAAAAAATAAATAGAGACAAAGTCTCACCA |
| | TGTTGCCCAGGCTGGTCTCCAACTCCTGACATCCAGCAATTCTCCTGCCTTGGCCTCCCAAA |
| | GTGCTGGGAATACAAGTGTGAGCCACCATACCCAGCCAACAATTCTTTAGTTTAAAATGTTA |
| | AACTGAATAAAGTCCTTAGTCATCTTTCCCCTAAGATTTTAATTAAATTTATTCAGAAAAAC |
| | TTAATTATAGAAACCAAAGCTCTAAGAGATTATGGCTGTCAAAAACAAATTCT |
| SEQ ID NO: 334 | ATCCAAGCAGCATGAAACTGCACTCCTAGTTAGGTTTGTGGATTATAAATGCTCATAAATTC |
| | CTTATCCCGTCCCTCATGGAAAGGTGGGGTTTACTTCTCCACCCCCTTAATTCTGGACTTGGC |
| | CTATGACTTGCTTTGAACCAGTAGAATATGGTGGAAATGAAGCTGTGCCCAATTCTGGGCTT |
| | ACCCTTTAAAACAGAACTGGCAGCTTCTGTTTTCTTCTCTTGGAATTCAGCCACCATGCTGTG |
| | AGGAAGCCCAAGCAGTCCTGTGGGGAGGCCCATGTAGAGGAGAATCAAAG |
| SEQ ID NO: 335 | AATACAAAAAATTAGCAGGGTGTGGTGGTGCGTGCCTGTAGTCCCAGCTATTTGGGAGGCT |
| | GAGGCAGGAGAATCACTTGAACCTGGGAGGCGGAGGTTTCAGTGAGCTAAGATCACACCAC |
| | TGCACTCCAGCCTGTTGACAGAGTGAGACTCTGTCTCAAAAAACAAAATAAAACAACAACA |
| | AAAAAACGAGATGATGTGAACGGACACCATACCAAGGAAGGTATATAGATGATAAGTTAG |
| | CAAATAAAATATGCTCAATGTCATTGGTCATTAGAGAAATGCAAATTTAAACCACAA |
| SEQ ID NO: 336 | TTGCAGAGCCCTGGGTGGGGCCTGTGACTCTGAGATCTCCAGGAGCTTGACAAGCTGGGAA |
| | GAGATGAGAAGTCATTGGCTGGCGAGGAAGGGCAGGGGGACGAGGTAGTGACAACAGTCA |
| | AATGGGCTCCAGCCAGAGGCAGTGAATACACCAGTGCTGAGGATCTGTGCTAGGAACAGCA |
| | AACAGATACCAAGGTTGGGGAGAGGGATCTAAGTCACTGAGAAAAGAATGAGGCCTGGTA |
| | GTGAGGAGCTTGGTTCAGGCATCCTCTTTGCATGAAGTCAGAACTGAAACCTAGGCGT |
| SEQ ID NO: 337 | CAAGAAGACATGACACCTGTGGCCTTCACACAGCAGGTCCCACCTGCTCGGTGACACACAG |
| | TCATTTCAGGGTCCACAGCGTCCCACTGTCCCATGTCACTGGGTGTCACAGGGCCACACACA |
| | CAGTGATCTCTCACTGTCACCCTCACTTGGAGTCTCCCATATCTTCAGTGTTGCACCCATGTT |
| | CCCAAAGCCACCATGTCACCCTCACACAGCATCAGACACAGTTCCACACTGGCTCTGTGTCA |
| | CTGTTACATTTCAGCATCATCCAGGACCTCCTAGCCTTAAAAAACAAAAATC |
| SEQ ID NO: 338 | ATTCTCAAATAGCATTTTATACTATTTCTTAATTTTTTATTAAACAATATCTGACTTCCTACTA |
| | TGGAAGATGAAGATGTAGCTCCCCAACAGCTTATTCCACTATCACAAAACACACCCACCTA |
| | CACGTGTTGCTTCCCCAATATTCACAATAGCGTTGCATCACAATATTTAGTGTTCTCATTTCT |
| | ATGCCTATTTAAATATTATTTATAGTTGAGCCATGTAGAACAACGTGATTATATTTGTACCAT |
| | ATGTTGTTCTCCCTGGAGTTAATAATTGCCTCACAGAATGTACATAAAT |
| SEQ ID NO: 339 | ATTTAATCTGACTGAATACTAATCTGTCCAAGACTTCCACCAGCAGTTCATTTTTCCACCAG |
| | CTTCTCATATTTCCACTTTACCACCAAACCTGACATTATCCAAGGTCTAAATGTTGCCAGTGT |
| | GGTACATGTAGTGATAGCAACAGTGTAGTGTGTGTGTGTGTGTGTGTGTGTGTGTTTTAGTG |
| | TAATAGTGTAGTGATAGTGTAGTGGTTTATTTTACATTATAATACTAATAAATGGAAGCATG |
| | TCTTCATATGCATGTTAACCCTATGGAGTTTCTCTTCAAAATACCTCTTCA |
| SEQ ID NO: 340 | AAATCTTTATTAAGGAAGGCCTAACAGCTGTATCAGATAAGTTTGCTTTTTCTTGGAAACTT |
| | TGGTAAAAAAAAAAAATCACCTGGGAAATAATGTGATTAGAGATGCTTCTTAAATGTGCAT |
| | ATGTGTTTAGTCTGTTCTACAAAGATATTATTTTCTTTGTAGCATTGTTTTATTGAACAAATT |
| | TTGTTAAATTTTCTATTAAAATAGTCTTATAGTGATTTAATAACAATTTGGAAAAGTCGCAA |
| | TCTTTATAAGCATATGTGTAAGTGAGATGGATTACTATTAAAATGCAATTTC |
| SEQ ID NO: 341 | CAGATTTAGGGTGAGCCGAGTGAGGCAGGGTCATGTGAATGCAGGGTAAAATCCTCTATCT |
| | TTATTTATATTGTTGATATTTTGTTCATCATGGATAGTTGTGTGAATTTCTACTTTTAAAATAT |
| | TGCATAAAGGTATTATTCATCTTGATTTCCAAAGTCTTGGTGCCTCCTTAAGTTTTGCACCTG |
| | GAGCACGTGCCTCACTCACTTCATTCTCATCCACCACTCAGCTATACAGTTGGAAAAGCATG |
| | TGATGATATGGACAGCACCTAGTATAAAGAGAAGCTTGAAAGAATTTTGA |
| SEQ ID NO: 342 | GGCTCATGCCTGTAATCCCAGCACTTTGGGAGGCTGAGGCAGGTGGATCACGAGGTAAGGA |
| | GATGAAGACCATCCTAGCTAACACGGTGAAACCCCGTCTCTACTAAAAAAAAAAAAAGTTA |
| | TACAAAAAATTAGCCGGGCGTGGTGGCCGACGCTGTAGTCCCAGCTACACGGGAGGCTGAG |
| | GCAGGAGAAGGGCGTGAACCTGGGAGGCGGAGCTTGCAGTGAGCTGAGATAGTGCCACTG |
| | CACTCCAGCCTGGGAGAGACGCCGTCTCAAAAAAAAAAAAAAAGATTTATAGAGCTA |
| SEQ ID NO: 343 | ACGAGAGATGAATTTCTGGGCCTCAGCCTGCCATTTACTTGATTCATGACTGGGCAAATCTC |
| | AGCTTTTTCAAAACCTTAAATTTCTTCTTTATTAAATGAAGGATTAGTCTAAATGACCTTCAA |
| | GGTCCATCTCAGCTGCAAAATGCTAGAATTCTATGACCATGCATTTCTAGTTATTTAAATTA |
| | TTATAGAAAAATACATTTGAAGCATGTAAGATTATCGCAACCTGTAGCTTTCATAATTGTCA |
| | CTAAGGAAAGCCATAGGATTCTCAGCTAATGATAAAATGATCGAGGTAAAA |
| SEQ ID NO: 344 | AGTTTTAATGAAGAAGGAAATCCTGCCATTTGTGACAGCATAGGTGAACCTGGAGGACATA |
| | ATGCTAAGTGAAATAGATCATATAAAGTACACATACTACATGATACCACTTATGTAATTAAT |
| | CTAAAATAGTCAAACACATAAAAGCCAAAAGTGGAATAGTGTTTCCAGGGACTGGAAGGG |
| | AGAGGAGAACAGGGAGGTATTAGTGAAAATGTACAAAATTTCAGTTACACAAGATGAATA |
| | AAAAGTCCTAGAAATTGACTCTATAGTATAATGCCTATAGTTAAGAATCTTGTATTA |
| SEQ ID NO: 345 | AGGTGTCATGGCTGACACCTGTAATTCCAGCACTTTAGGAGGCTGAGGTGGGTAGATCACTT |
| | GAGGCCAGGAGTTTGAGACCAGCCTGGCCAACATGGTGAAACCCCATCTCTACTAAAAATA |
| | TTTTAAAAATTAGTTGGGCGTTGTGGTGTGCACCTGTAATGCCAGCTATTGGGGAGGCTTTA |
| | GGTGGGAGGATAGTCTGAGCCATTGGAGATCAAGGCTGCAGTGAGTCGTGATCTGATTGCA |
| | TGACTGCTCTCCAGCCTGGGTGACAGAGCAAGACTGTCTCAAAAAAAAAAAAAA |
| SEQ ID NO: 346 | CCCATGCCTTAAATATGCTTCTTATCCTCTCACAGTCAAAAAGGATTTTTACCTTGGTACAGT |
| | CTGATTCCTGCAACACCTCTCTAGTTATTGAATGTATAGTAGTTTGCTATAGACAGACTACTT |
| | TGCAGTGGCTATCAAACCTTTCTGAGACTCATTCTAAGAAATACATTTACATTGTGACTTAG |
| | TATATGCACACATAAAAAGAAGAAAGTTTCACAAAATAGTTTCCTTACTAGCAATGAGCTG |
| | TTTTTTGTTTTATTTCGTTAACAACAACAACAACAACAACAAAAACTGCTA |
| SEQ ID NO: 347 | CTCTGGGCCTTTACTGCCGAATCCAGGTCTCCGGGCTTAACAACAACGAAGGGGCTGTGACT |
| | GGCTGCTTTCTCAACCAATCAGCACCGAACTCATTTGCATGGGCTGAGAACAAATGTTCGCG |
| | AACTCTAGAAATGAATGACTTAAGTAAGTTCCTTAGAATATTATTTTTCCTACTGAAAGTTA |
| | CCACATGCGTCGTTGTTTATACAGTAATAGGAACAAGAAAAAAGTCACCTAAGCTCACCCT |
| | CATCAATTGTGGAGTTCCTTTATATCCCATCTTCTCTCCAAACACATACGCAG |
| SEQ ID NO: 348 | ATGAAGCACTCTAAGAAAATTCAGCTGGGCAGGTATTTTAAGGTCACTGACTGACTCCAAA |
| | GTGAAGGTAGAACCCATATTGACCGCAATTCATCACACTTCTGTAACTTCAGAACTCACTGC |
| | TGACTGGTGGAGAAGGTTGCAATTGCATTCAGTCCGAATCTCTGAACATATTATTTAGAAAT |
| | ATTAGCTTATCCAGCTGCCTACGGAGCTTCCCATCTGGGCTTTCAGTTGCTACATTCTCTAAA |
| | GCCGTATCTGACCCACACCTTACTAACACTATGTGCTTCTACAGCATTCACC |
| SEQ ID NO: 349 | GGGAAAAGACTCCCCAGTCAATAAATGGTGCTGGGAAAACTGGCTAGCCATATGCAGAAG |
| | ATTGAAGCTGGACCCCTTCCTTACACTGTATACAAAATCAACTCAAGAGGGTTAAGGACTTA |
| | AATGTAAAACCTAAAACTGTAAAAACCCTGGGAGACAACCTAGGCAATACCATCCTGGACA |
| | TAGGAACGGGCAAAGATTTCATAACAAAAATGCCAAAAGCAATTGTAAGAAAAGCGAAAA |
| | TTGAAAAATGGGATCTAATCAAACTTAAGAGCTTCTGTTACAGCAAAGGAAACTACC |
| SEQ ID NO: 350 | ACGCTTCAAGGCTGCCAAATATCACAATTTATGTAACTGCAGTAAGAGTAGCATATATTTCC |
| | ATAGCACTTATGTGCCAATCATATTCTGAGCACTTTATGTTTATTAACTTATTTAGCCCTCTC |
| | GACAACCTACGAGGTAGAACTATTATTTCTATTTTACAAAATAGGAACTAGGCACAGATAG |
| | GGTAAGACAGTAGTTCAAGATCACAGCCACTGAACAGCAGAACCAGGATTTGAACCCAGGC |
| | AATCTGTGTTCTTCGGGCTCTGTGTTCTCAACCATTATTAAACAGTCTTATTA |
| SEQ ID NO: 351 | GACGATGAAATACAAGGTTAATTTTCTTGACCAACCATATCTAGTAAATGGCAGAGCTCTA |
| | ATTTAAACCTGGAGCTCCAGCTGTACAGTCTTAAAAAATACTTCAAATATTTTATTGATTCT |
| | CCAGAATGTGTCTGTTTTTGTTTGTATAACTGGAGAACATTCCAAAGCATTTCATTAATTTTT |
| | TAAAAGAAAATATTAGCTGAACATTAACATCAGTGATCTTTAAAAGAAAGAATAATGTATG |
| | AGTTTAGGAATTAGTTATTTTAATAATAGAGTAGGAGTCCAAATTTGCTTTAA |
| SEQ ID NO: 352 | GCTGGGCGCAGTGGCTCATGTCTATAGTCCTAGCACTTTGGGAGGCTGAGGCAGGAGGATC |
| | ACGAGTACAAGAGATCCAGACCATCGTGGCCAACAAGGTGAAACCCCGTCTCTAGTAAAAA |
| | TACAAAAATTAGCTGAGCGTGGTGGCATGTGCCTGTAGTCCCAGCTACTCGGGAGGCTGAG |
| | GCAGGAGAATTGCTTGAACCCGGGAGGCAGAGGTTGCAGTGAGCCAAGATTGCGCCACTGC |
| | ACTCCAGTCTGGCAACAGAGAGAGGCTCCGTCCAAAAAAAAAAAAAAAAGTCTGGT |
| SEQ ID NO: 353 | AGCTTAAAGATGTGGTAGCAGCTGCAGACCAGTACAGCGTCCTACAGACGCCCACAAAGGC |
| | CTGCATGTAGGGCATCAGGGCATTCCCAAATGAACCATGACGTGCAGAGTGGCACCGAGTT |
| | CGGGAAAACCAAGAACCGAGTGTTGGGTTCCGATCTGCCAGGGTTATAATATCCTCTGGCA |
| | AATGGCCCAGATGCAATCTGTACAAAATGGAATTAAGACGAAGCCCTCCCTGCTGAATGCC |
| | TGAGAGGAACCAAAACATCACTTCCATTTTTATTTCAGGGCAAAAACTATATTAGA |
| SEQ ID NO: 354 | GCCAAGGCAGGAGGATCACTTGAGGCCAGGAGTTTGAGACCAGCCTGGGCAATATTGTGAG |
| | ACTGTGTCTCTCCAAAATATTTTTTAAGAAATTGGCCAAGCATAGTGGCATGTGGCCAAGCT |
| | GCTCTGGAGGCTGAGGCAGGAGGATCACTTGACCCTAGGAGTTCAAGGGTGCAGTAAGCCA |
| | AGGTCACACCACTGCACTCCAGCCTGGATGACAGAGTGAAACCCTGTCTCAAATAAATAAA |
| | ATACATATTTATCCTTAAAATCACATAGTGCAATTGTATTTACAAACAAAAGTCC |
| SEQ ID NO: 355 | AAGGCATGGCAGAGAGAGGCCACCCATCCAGGGCCACACAGCTGGTCATCTGCAGAAGCA |
| | GGGTCTGTGCCCACGTAGACCACCTGTTGTGACCTCTTCCTTTCTATAGCTAAATCCATTCGT |
| | CTTCTCAACAGGTATGAAATACATCCTTATTTTTGCATGAAGAAACCAAGGCTCAGAGAGG |
| | CTTATGGGTGGCCCAGATAATTGTGAATTAGCACATTGGGATCCAGCTCCATTTCACTTTTG |
| | AAACCCAACTTCTTTACAATATGCTGTTCTGCCTCCCTGTAAGGTCTGAGAATT |
| SEQ ID NO: 356 | CTCCCAAATTGCTGGGATTACAGGCATGAGCCACCGCACCCGGCCCACTTTCACCAGTTCTG |
| | TTCATCATTGAACTGGAAGATTCTATCTTTGGCAGTTTGCAAAACAAATAAACTTAAAACTG |
| | GAGTTAAAGACATCCAGATTAGAAAGGAACAGTTTAAACCATCTTTTTTCAGATGACATGA |
| | TCTTGTACATAGAAAATCCTAAGGAATCAACTTTAAAACTGTTAGAATAAATGAGGTTGTA |
| | GAGTAAAAAAAAATCAATATACAAAAATCAATAGTGTAGTGCAGAAATATATTA |
| SEQ ID NO: 357 | GAGCATCCTCGGAAACACCTGGAAACTTCAACATACAAAAAGCCCAGGCGCCACCCTGGAC |
| | CAAATGCATCAGAATCTGCATTTTTACAAGATCCCCAGGTGACTCATATGCACATGAATGTT |
| | TGAGAAACATTGCTGCAGACAATGGGGAGCCATTGGAGGTCCCTGGGTGAGAGGAGTAATC |
| | TCTTCTTAAATGTGCTTGGGAAATGCAACTTTAGGAAGCACAGTAGAGGGCACACAGAATG |
| | ACCAAATGAATGAACAGTTATTCAACCAACAAAGTCTTTTGAAAATATGAATGTT |
| SEQ ID NO: 358 | CAGGCATCAGTTACATAACTTGTATGACAGGGAACAGTCTTGACTTGGGTATTTCCAAATAA |
| | GCCAAGTTTTACACACAAAATGAAGTATATTTAGTGGATTGATGATTGAATAGGGAAGTAC |
| | TACTGAGAAATCATCACCTAGGGGAACCTCATCTTTTCAATGTGTGGGATAAAGATTCCCAG |
| | AGGGTATAGGATTGATATTGTTGATGAAAGGATGAGAGAGAGGAAGGCTGTGAGTTACAAC |
| | AAAATTCCAGGGAAGTTAGAACAACTTTAAAAAGACTTAAAAATAGAAGAAATG |
| SEQ ID NO: 359 | TAATCTTTTAAATTCACTCAATAGTATATTATTGAGATCTTTCCATGTCAATACCTGATGTCA |
| | TTTATAATGACGGTAGGATAGTTTTCCTTTATAAGTATGTACCTTTATTTAGCCAAGATTGAC |
| | TTTTAAGATGTTTCCATATTTCATTACTATAAATAGTATTTAGAAAACTTCATCCTAATTGTG |
| | ATTTGTTTACCACTGCAGCCAGATATAAAATACGTTTTCTTAGCTGGGAGACTCACTTTTGC |
| | ATAGAGGTATAAGTATAAGTATATTTTTAGGTGAAGTTCACATAAGTTA |
| SEQ ID NO: 360 | CTTGATTTTTATCTAGAGTCTATATAGGACAAACCATATAAAACTATCATTGGAAACCATCT |
| | ACATATTTTGTTCAATGTCCCTTACACATAATTTTTTCCTTTGAAAAAGTAATCCACATCTTT |
| | TACAAGATTATAGGAGTTATAAAATCCATTCTGTTTACCTTGTTACTGGCTATCAGGAATTT |
| | CTGTGTGGGTTTAATCACAGTTAATATATTTGCTCCTGTAATCATATATTTTCGACTTCCAAA |
| | AAAAAAAAAGCATTTTTTTTCTCTATTCTAAACGGTTTTTTGAAAAAAAA |
| SEQ ID NO: 361 | CCACGCCGTCGGTAGGTCCCCGGTCCGGGAGCGGGAGAGACCGGAGCGCCGGGGACGACC |
| | CCGGCAAGGGCGTGGCGTATGCAGATGAGCACGGCGCGCGGAGGCTGCCGGTCACGCTCG |
| | GCCTGGGACCCCATGTCCCGCGCGCGATATCCGAGTGCTGTCGGGGTGTCTTCCCCTAGCGG |
| | CAACGGTGGAGCGAGGGGGCTGGAGAGGGTGAGGGGGCTGGGGCCGCACGAGAGAAGTG |
| | ACCGTGTGTTGAGAGTGTGGTGGGCGCGAGGGTATGAGAGGAAGCCGCACGGCCAGTCC |
| SEQ ID NO: 362 | GCAAGTCATTTGGCCTCTATGAGGCCAGTTCCTGCAATTTTAAAATAAAATCAGTAGATTTC |
| | ACTTTACAAAGAGGTTGCAGTAATCAACATAGATAATGTATATAGAAAGTGTCTTGTAAAC |
| | TGATCGTTACTGTATATAAGGTTATTATTACTATGACTTCTTTTTCCAAGCATTGCAAAAATC |
| | GTAGAAGACATTTTTGTTGGTATCTATAGTTATAAATATGTATATATAGTATATTGATTAGAT |
| | TATTCTAAAATCTTATTCAAGTCTACTAATTTGATGTTACTTAAATCTTAA |
| SEQ ID NO: 363 | ATAAGGAGGTGCTTTTTTAAAATTGTTCATAGACTTCTGTAAAATGCAAGATAAATTAAAGT |
| | TATTATAACAGTGAAAAAAATCTGATTGATGCCTTTTTCCCCCCAACAATGATTGGAAATAT |
| | AGATGTCGTACTGGTTCGAAATATTTTTTTTTTAAGTTCTCAGGTCTTGAAATCTCCAATCCC |
| | ATCTGCACATTCACCATTTAGACATCTTGGTAAGTGTTGACTTGCCCCTAATATTTTGATGTT |
| | TATAGTAATGAATATACTAGTGTAAATTCTCAATCAGAATGGAATATTCT |
| SEQ ID NO: 364 | ATATGATCCTTACCTTAAAGACACTGGCGATTTCATGGGCACAGAAACAAACATGTGTGAA |
| | GTACTGGGATAGCTTAGGAAGCCGATCCCCCACGTGTCCCATTTACCAGAGTGAATCAGAG |
| | TGCAGGTGATGCGGAATATTATCTTCCATGCTATTCCTGAAATATTTCCATCTGTCCCTGCCT |
| | CTCTGTTACCACTGAAATGTTCCTTTTTTTAATTCCTTATCATCTTTTCACCTATTAAAGTAGC |
| | CTCTTAAGTGGTCTCCAGAAGAGAAGCTCCAGATCTACTGCAGGCTACTCC |
| SEQ ID NO: 365 | TCAGATAAAAGCATTTATTTTCAAACAATACTCACTAAAACTTTTGTACTTTTAAATATTTAC |
| | TCCAAGCCTTCTGCAAATAAAGAAGTATTTTCCCTCAGTAAATCAAATTCTCTGTTGAGTTT |
| | CTGAATTGCTTTCATTACTTATACATATTAGAATTTCATTCCAGGATTTCATTGTGAAAAAAT |
| | TATTGAAAAGTATTTGAAAATTGTTCTATTAAAACAAAGATGCATGTGATAGTAGAAAAAA |
| | AGCATACATTCATTTGCTTTTACAGGTCAATGAAAATTTGAAAGAAATTTT |
| SEQ ID NO: 366 | ACCGTCGCCCAGGCTGGAGTGCAGTAGCGTGACCTCAGCTCACTGCAACCTCCGCCTCCCA |
| | GGTTCAAGGGATTCTCCTGCCTCAGTCTCCTGAGCAGCTGGGATTACAGGCGTGCGCCACCA |
| | CACTCGGCTCATTTTTGTATTTTTAGTAGAGACGGGGTTTCACCATGTTGGCTAGGCTGGTTT |
| | CAAACTCCTGACCTCAAGTGATCCACCCACCTTGGCCTCCCAAAGTGCTGGGATTATAGGCG |
| | TGAGCCACTGTGCCCAGCCCAGTTGTATTCTTTATGATGGTCAAAATTTCCA |
| SEQ ID NO: 367 | CTTACATACAACTGAGTTTTTGCTTACACATTCTTTAATTTCTTTTAATTCCTATTTCAGTCTG |
| | ACTGAAATTAGAGGAGCTACCTGGCTGCATACATTACTGATTCCCCGCCAACGTGTTTCTAT |
| | GTTCTTTGAAAGACAATGTAATTGTGCCTTACTTGAAGTAAATTGATGTGATCTCCACAGTC |
| | ATCCCATAAAATATTCACTATCATTATCACTATCATTATAATCTGGCTCAAAGGCCAGATTA |
| | AGATGGTCAAATAAATTAGTTTGTTAAACCAATTTAAAACACACAGTCTT |
| SEQ ID NO: 368 | TCTCCACTGTCCCTGTCAAACTCCCAGCAAATGTGCACAGGGAGGGTGGGGATGGCTCCAT |
| | CTTCCAGGGTGACTGTGGGTGAGCATCCTACAGCTCAGAGGCTGCATCCTGCAGGGCGAAT |
| | CCACCCATTTCCCTGGCTTCTCCAAACACCTCAGCCTCTTGGTCTTCTACCCTTTGCCCTCTG |
| | CAAGAGAGGGAGGAAGGTGTGGTCAGCATGGACTTTACCCCTGAAGGGCTATTGCTTTAAG |
| | GAGTGTTGAGGATTGGGAAGACATCTGTTAAGCCAGCTTGGCAAATTCCCTGTC |
| SEQ ID NO: 369 | TGCAGTAATAGAGCATGGATCTGAAGAGGTGTGATTCATTTTCCTTAGGTGTCTGCCTCTGC |
| | TTTTCATTTAAAAAAAAAAAAACTCAGCTTCTATTTCTAACACAAACTTTCACCTCCTATGG |
| | CTTAAATAGATGTCATAAAAATTTAGGATTTATATAGGGAATGTACACACTTAAGTCAGCA |
| | AAAACTAAATTAATTTTGCCCTATATTGTGCTGGTGAACCATGATATACCTTATAATCTTGTC |
| | AAAAAGAAAAGTTGTAGCTGTGTTCACAGGAAAAAAAAAAAAAGAAAAACAC |
| SEQ ID NO: 370 | GGTCAGGAGTTTTGAGACCAGCCTGGCCAACATGGTGAAACCCAGTCTCTACTAAAAATAC |
| | AAATTAGCCGGGTGTGGTGGCACATGCCTGTAATCCCAACTACTTGGGAGGCTGAGGCAGG |
| | AGAATCGCTTGAACCCAGGAAGCGGATGTTGCAGTGAGCCGACACCACAACACTGCACTCC |
| | AGCCTGGACAACAAGAGCGAAACTCAGTCTGAAAAAAAAAAAAAAAAAACTTTACAGAAA |
| | ATTTCAAACATACACAAAAGTAGAGAGAGCCTCTCACCCAGACTAAAAATGATCAGC |
| SEQ ID NO: 371 | TGGCTGACCTGTCTGTCCTCCCATCCAGCCAGAGGGACACAAAGACCTCTTTGTCTCTCCAC |
| | CCTTCCGCCCAGAGCCTCCCCAGCCAGTGCAGCTCTGAGCGTGTCCCCCAGGGAGGGAGAC |
| | AGCCCCTGGTGGGGACTGGCAGTCCTGGCAGCTGCCCTGAGGCACAGGCCCTGGGGGACTC |
| | GGTGCTTTGAGGGCAGGGGCAGGTGATGGAGATCGGCTGGGGAAAGGGAGGCCGAGAAGG |
| | CGGCAGTGTGGAGCGTGTGAATTTGTTCATGAACTTAGCTACAAAAATGTCTTTTC |
| SEQ ID NO: 372 | GCTCGTGCCTGTAATCTCAGCACGTTGGAAGGCCGAGGCAGGTGGATCATCTGAGGTCAGG |
| | AATTCAAGACCAGCCTGGCCAACGTGGTGAAACACCGTCTCTACTGAAAATACAAAAATTA |
| | GCCGGGCGTGGTGGCGCATGCCTGTAATCCCAGCTACTCGGGAGGCTGAGGCAGGAGAATT |
| | GCTTGAACCTGGTAGGCGGAGGCTGCAGTGAGCCAAGATCGCGCCACTGCACTCCAGCCTG |
| | GGCAACAATGCGAGACTCTTTCTCAAAAAAAAAAAAAAAAAAAAATTTTTTTTTGT |
| SEQ ID NO: 373 | AAGGAGTCTTAAGAAGCTGACATTTTAAAAACAAAAAAAAAGTTGTTATTATAGTATTGTG |
| | ACATTCTGCATAATTTCCTAATGAAGACCAGCATTCATAGTGCTGAGGAACAGACTTTTCCA |
| | GGCATTTTACTGAATAAGCTGTAAAATGCTGCCTTTGACTTTGCTGGTGGCCTGCTTGGCAT |
| | AGCTTCTCTAGGTCTCTGCTTAACGTTCCCAGACAGCACAGCACTTCGAAACACTCTCCCCA |
| | CTGAATACAACTAACAAGTTCTTGATAAATCTCTACTATCAAAACTTATTTGG |
| SEQ ID NO: 374 | GAATCTTGCTCTATTGCTCAGGCTGGAGTGCAGTGGCGAGATCTCAGCTCACTGCAACGCCT |
| | GCCTCCCAGGTTCAAGCAATTCTCCTGTCTCAGCCTCCCGAGTAGCTGGGACTAAAGGTGCG |
| | CGACACCATGCCGGCTAATTTTTTGTATTTTTAGTAGAGATGGTGTTTCACCATGTTGGTCAG |
| | GCTGGTCTCAAACTCCAGACCTCAGGTGATCTGCCCACCTCTGCCTCCCAAAATGCTGGGAT |
| | TGCAGGAGTGAGCCACTGCGCCCAGTCCATAGTTAATTTATAAATTGTTTA |
| SEQ ID NO: 375 | GCAGCAAGGCCTCCACTTCACCCCCTAAAGGTTGCCCCAAGAGCACCGTGTGACTGCTAAG |
| | GTATTTCCGGAGTCTAAAGACGATTATTCAGGTCTCATTTGCATACCCATAATACACTGCAA |
| | ACAGTATTTTTTTCGGAAAAACATTTATATATTGCTTGACATTTTTAAGTATGAGAATTTTGC |
| | ATGCAGAATTTTTTTGTATAAACTTTCTCAGGTAGTAACCCTTGGGATTAGTAGACACCATC |
| | AGTGTACTAGGAATTGCAGTTACCCGAAAATTGAGTTACAGAAGTAACTGGT |
| SEQ ID NO: 376 | GCCAGCCAGTCTTCGGCTTCGCCCCCTAACGGTGACATAAGGCACTCTGTGAAATGCTCTGT |
| | TCCGGAATCAAAAGATTGATCCGATTATTTGCATACCCATAATGCACTGCTCACAGTACAAA |
| | TTTAAAAAGGCAAAATCAAACATTTTTATTCTAAGCATATTCTGTGAAAGTTAGACTTTTGT |
| | TTAAACAATACTCTTAAAATTTTTTTCTAGGTATAGAACCTTGGCATTCACTAGTCACCATCA |
| | CTATACTAGGAGTTTCTGTTACCCGAGAAACGAGTTATGAAATTAACAAGC |
| SEQ ID NO: 377 | TGCATCATTAATGACCCAAAGACATTCTCTTTAAAAAAAAAAAATTACCACTGTCACACTCT |
| | TCAATCTTCCACACCACCTTTTTTGCGTTCCCATCTTCCAGGTCCTCTTGGTTACTAAAAATA |
| | ATGTCTACACTTCTATTTAGTTTTACTTCATCTTCTCACATCTATCAAATATTTTTTAAAGATA |
| | TGTTTAAGAATAGGAACAGTATTTTTCTTTCTTTTTTTTTAAATTGCTGCTCCTTGTAGAGCA |
| | GGGCTACGCTGCAGGCAGTGTGCCCAGAATAGCAAGAACAGTATTTCT |
| SEQ ID NO: 378 | TCTTTCTTTTTTCTTTTTTGAGACAGAGTCTCACTCTGTTGCCTAGGCTGGAGTACAGTGGCG |
| | CAATCTCAAATCTCGGTTCACTGCAACTTCTGCCTCACGGGTTCAAGTGATTCTCCTACCTCA |
| | GCCTCCTGAGTAGCTGGGATTACAGGCGCATGCCACCACACCCAGCTAATTTTTGTATTTTT |
| | AATAGAGATGGGGTTTCACCCTGTTGGTCAGGCTGGTCTTGAACTGTTGACCTCGTGATCCG |
| | CCCGCCTCGGCCTTCCAAAGTGCTGCGATTACAGGCGTGAGCCACCACAC |
| SEQ ID NO: 379 | GAAGTTCAAGAAAAGCCTGGCTGACATGGTGAAACCCCGTCTCTACTAAAAATACAAAAAC |
| | TAGCCGGGCGTGGTGGCGTGTGCCTGTAATCCCAGCTACTCGGGAGGCTAAGGCAGCAGAA |
| | TAGCTTGAACCCGGGAGGCAGAGGTTGCAGTGGGCCAAGATCGCGCCATTGCACTCCAGCC |
| | TGGGCAACAAGAGCAAAACTCCATCTCAAAAAAAAGAAGAAGAAAAATGGTTACAAAGAC |
| | TATGCAGCAATATGGAAAGTGATTATGTGTGGGCATAGTGTTACAACAACTACCTAC |
| SEQ ID NO: 380 | ACCTCATGTTGAGAACCTTTGATCCAGACTGCAGAGGGCTGGCTGGCAAATCAGCTGCATG |
| | TTGGGAGTCACCTGAGGAATGTTTTAAATGCTGATGCCTGAGTTTGGACCTGAGGTTCAAAT |
| | GTAAGTGATCTGGAATGTGGCCTGGGATCAGGATTTTTGTAAAGCACTTTGGGTGAGTCCAT |
| | GTGCAGTAGATTTTGAGAGCTGTATTCTAGTGGATCTGCCCTGTTGCTAACCCACCAGAAGG |
| | AACCAGAGCAGAACGTGCCCTTTTGGAAATAACTGGGACCATGAAGAGACTGT |
| SEQ ID NO: 381 | TTACTGTACCTTACCATAGCCTATACTGACCAATAAACTGAAAATTTCCTGTGTTAGTCCATT |
| | TGAGCTATTATAAAGGAATACCTGAGGCTGGGTAATTTATAAAGGAAAGAGGTAATTGGCT |
| | CATCGTTCTGCAGGCTGTACAAGCATGGTGCTGGCATCTGCTCAGCTTCTGTAGAGGCCTCA |
| | GGGAGCTTTTACTCATGACGGAGGCTAAGTGGGAGCAGACAGTCAGTCACATGGCAAGAAA |
| | AGTAGTGAGAGAGAGAGAGGGGAGGTGCCACAAACTTTTAAACAACGAGATCT |
| SEQ ID NO: 382 | GAAACAGTTCCAGAGTTTCTGCTGCTCTCTGTCAGAGCTCTTCATGTCCTCTTTCCAGTCCTA |
| | CGGAGCCCCACGGGGGGACAAGGAGGAGCTGACACCCCAGAAGTGCTCTGAACCCCAATC |
| | CTCAAAATGAAGATACTGACACCACCTTTGCCCTCCCCGTCACCGCGCACCCACCCTGACCC |
| | CTCCCTCAGCTGTCCTGTGCCCCGCCCTCTCCCGCACACTCAGTCCCCCTGCCTGGCGTTCCT |
| | GCCGCAGCTCTGACCTGGTGCTGTCGCCCTGGCATCTTAATAAAACCTGCTT |
| SEQ ID NO: 383 | CTACTAAAAATACAAAAATTAACCGGGCATGGTGGCGTGCACCTGTAATCCCCGCTACTAG |
| | AGGGGCTGAGGCAGGAATTGCTTGAATCCAGGAGGCGGAGGTTGTGGTGAGCAGAGATTG |
| | CGCGACTGCTCTCTAGCTTGGGCAACAAGAATGAAACTCCGTCTCAAAAAAACAAAACAAA |
| | ACAAAACAAACAAACAAGAAAAACATCAGACCTCGTGAGAACTCACTCAGTTTCACCAGA |
| | ACAGCATGGTGGAAACCACCCCCATGATCCAATCACTTCCTACCAGGTCCTTCCCTTG |
| SEQ ID NO: 384 | ATAATTACACCACTGCACTCCAGCCTGAGCAACAAGGCAAGATCCTGTCTCAAACAAAACA |
| | CCTAATTATTTGGAGTATATAGAATTTGAACTTGTTATGCATGTATGAACAGAAGTTATTTG |
| | GAGTATATAGATTTTGAAGTTGGCTTAGATGTATGATGAATTCTCAGAGGTTATGATTAATT |
| | ATCTTTACCTTTCATTCTATAAGATTTTATTGAATACCTTCTAGATGCTAGAATTTCAGCAAT |
| | GAGCAAGACTGATAAGGTCTTTGTCTAAGGAAGAACATAGACCCCATAAAAT |
| SEQ ID NO: 385 | AGAAAGAAATTGAATGCTGATTATGTGGTTTATGGTATGTGGATTTTAATAAATCAAATTTG |
| | TCACTTTAAAAAATTAGAGCTCCAGCCTGGGCAATGTGGCGAAACTGCATCTCTACTAAAA |
| | ATACAAAAAATTACCCGGGCATAGTAGTGCACACCTGTAGTCCCAGCTACTCAGGAGGGTG |
| | AGGTGGAGGATCACCTACCTGAGCCTGGGAAGTTGAGGCGGCAGTGAGCTGTGATTGCGCC |
| | ACTGGACTCCAGCCTTGTTGAGAATGAATTAATTAATTAATTAAAATTAGAGCTT |
| SEQ ID NO: 386 | TCTCCTGCCAGACTTCCCAGACCTGGCAAAGGTTTAGAAACTGTTGCTAAGAAAAGTGGTCC |
| | ATCCTGAATAAACATGTAATACTCCAGCAGGGATATGAAGCCTCTGAATTGTAGAACCTGC |
| | ATTTATTTGTGACTTTGAACTAAAGACATCCCCCATGTCCCAAAGGTGGAATACAACCAGAG |
| | GTCTCATCTCTGAACTTTCTTGCGTACTGATTACATGAGTCTTTGGAGTCGGGGATGGAGGA |
| | GGTTCTGCCCCTGTGAGGTGTTATACATGACCATCAAAGTCCTACGTCAAGCT |
| SEQ ID NO: 387 | GAGCAACTTTTCACATGCTTATTAGTCATTTGTATAGCTTCAGAGAACTGTCTATTCAGATCC |
| | TTTGTCCATTTTTAAATTGGGCTGTATTTTATCATGGAATTATTGGAGTTCTTATTTTCTGGAT |
| | GCATAAATTTTATTTTTTTAATTTTTTAAGTTGATGTAGGCGTGTTTTATAGGTGCCAGGCAC |
| | CGTACTAAGTGCCTTTTTGTACATTAACTGGCAGTCCTATGATATATGAACTAAATTTTAACT |
| | CCATTTTATACATGGCTTTTTTCTCTATTTATTTTAACATATTTATA |
| SEQ ID NO: 388 | CAATTATTCTACCATAAAGACACATATGTTAATCACAACACTATTCACAATAGCAAAGATAC |
| | ATAATCAATCTAAATGCCCATCAACAGTAGACTGAATAAAGACAATGTGGTACATATACAC |
| | CATGGAACACTATGCAGCCATAACAAAGAAGAGATCGTGTCCTTTGCAGCAACATAGTTGA |
| | AGCTGGAGGCCAATATTCTAAGCAAACTAATGCAGAAGCAGAAAGCTAAATACTGCATATT |
| | CTCACTTATAAGTGAGAACTAAACAATGAGAACACGTGGATATAAAGAGAGGAAC |
| SEQ ID NO: 389 | TCTCAGCTTGCAGTTTTTTGGACCACCCAGGGACTGTGAATACAGGCTGTAATTCCACATAG |
| | GAACCAGGTTTGGTTACAAATTCTCGGGAAAGATATCCACCAACGCCCCTACTCATTGTCAA |
| | AGTTTGAAACAGGTAATTTACCTTGCAGTCTCTACCATGGGAGTATTCATCTATGGAGTCCC |
| | AATTTTTACTGGGTGGGGTGGGGAGTGTCTCCTATTAGATACCCTGCTTTGGATGGGGTCTG |
| | GGTTTTGTCACTTGGCTCTTGTGCCTACAGGACTATGAAAAACAAAGCTCTT |
| SEQ ID NO: 390 | ATATTTCCCAAATTTGATGAAAGACATGAATATATTCATCCAAAAACTTAAACATTAAGCAG |
| | GATGAAGTCAAAGAGATCCACAGTAAGACATGTTATACTCAAATTCTACAAAGCAAGAGAA |
| | TCTAGAAAGCAAAAGGAGCTAACTCTTCACGTACAAGGAATCCTCAATAAGATTAACAGTG |
| | GATTTCTCATCAAAAACTATGGAGGCCAGAAGGAAGTGGGATGGCATATTTAAAATAGTAA |
| | AAGAAAATAACTGAGAATTCTATATTTGGAAAAACTGTCCTTCAAGAGTGGAGAA |
| SEQ ID NO: 391 | GAAGCACCTCATCAAACTGGGCGGGAGCATAGAGTTTACATGTATTTTTATTAGAACGTGC |
| | AGATCTTTATAATCTACATTACTGTTTATGATAAACATGCTATTACACAGGATCACAGATAG |
| | ATTACCCCATTTTATATGAGGTGATTATTACACACTACATGCCTGTATCAAAACATCTCATG |
| | TACCCCATATATATATATATATATATATATATATATATATATATATATATACACACATACATA |
| | CATACACACACACACACTTAATATATACGCATAAAAATTAAAATTAAAAACA |
| SEQ ID NO: 392 | GGCGTGTACCACCATGCCCGGCTAATTTTTTTCACGATGTTGGCCAGGCTGGTCTCGAACTC |
| | CTGACCTCAGGTAATCTGCCCACCTCAGCCTCCCAAAGTGCTGGGATTACAGGCATGAGCC |
| | ACCGTGCCAGGCCCAGTTCCACCATTTCTAAAAGGGAATAATAATTATACCCACCCAATATG |
| | GTTATTGTGAGGAGTAAATAAGTAGAGTGTTTAGAACTCTCTCTGGCATATAATCAGCACTC |
| | AATACGTGTTAACTATTTCACTATTTTTGTTATCATCATCATCAAATTTCAGA |
| SEQ ID NO: 393 | AACCCAGCCTGTGCCTCCACTGGCTTTGCCCACTGCACCCCCGCCTGCTCTAGCCCTGAGAA |
| | GCCTGCAGGTCTGTGCAGCAGTGGCTGCCTCTTTTAATGAAAGCATTCCCCATGGGAAGAG |
| | GCCTGGCTATTTAACAAGGAAATGTGTGGGTGGTAGAAACTGCTCCGATGCTGGCAGCGGC |
| | ATAAATCCAGCAGAAAGGAACAGGAACCTCAGAGGCTTCCTAACAGACATCATCTTCCTGC |
| | CAAGGGGAAGAAAATAATATCAGTGGGGAGAGAATGAACTCAAGACATAGGCAGC |
| SEQ ID NO: 394 | TTCCAACTTTATGCATACCTCTAACTTGAGTTTGCATCTATTACCATTTCTTGAGGCCCTAGA |
| | CTTTTCAAACTCCAGGCTTTGAGCTGAAAAAGTTGCAAAAGAATATAAAGAATGAATCTGT |
| | AAACTGATTTCTTAATTGTATATTCTGAATTCCAGACAGAGTCACTGGCCACATGGCAGTTT |
| | CAGAAATTAAACCAAAACTTAAGCTGAATCCTCTAACAAAAGTACCCATCTCCCACAATAA |
| | AAGGTAGGTAATGAATGATTAAGGGTGATAAATGTATTATGATAAAGAATTAT |
| SEQ ID NO: 395 | ACAAGAAGCTCCCTCTATGTGCCCTGTAGGGACATTTTTCTTGGAGAATCGTAACTCTAAAT |
| | TCTTACCTCGCAGAGAGGGACCCGATGGGACCTGTTTAGTAAATATTACTGAGTTCTGCCAC |
| | TTGTCGACAATCTTCCAGGGAGATAACTCCTAATTAATTAGAAAAAGTGCCTGCCCTCGAGG |
| | CGCATACATTCTATGAGTGAGAGAAACAGACACAGATGTGACATGGATGCCGCAGCGCAAG |
| | GATTTTGTCTGCATGTTCATTGCTGAGTCCCCACGTTTAGAAGGGTACCCTGC |
| SEQ ID NO: 396 | TCAGTTTCCCATTTACACCCATGATAGCACAGGTCAGTGCCCCTGAACCCCCAGTTCTTCAG |
| | TACTGCTGGGCACTGGCCTGATCTTGACTTGACTGACATCTGTGGGGAGGACAAATAAAAC |
| | TTAGATGTTGTAACTCTATCTACAAAAACTATGTTTATGTTAAAAGGAAAGGAAAGAGTATT |
| | TTATATATATACAAAATCACCTACGTAAATATGACTCAAACAGACGTACACACAGAGAAGC |
| | ATAGAAAAAAGTCTAAAAAAGTATATACCAATATGTACATCAAAAAGCCATAAG |
| SEQ ID NO: 397 | GGCAGGTGCCCATGTCTCTTCTATCTAGAGCAACAGCTTCTTGCCTGGCCTCCCTGCCTACC |
| | CATGCTCCCTCCACTCCCTGGTTTCCAAACTTCACTGCATTCCGGAATCCTCAGGGAGCTTCT |
| | CAAAACCTAATGCCCAGGCCACACTGTAGTCCAGTTGAAGGAAAGTCCCTACGGCTGCTTC |
| | CAAGCTTCAGCGCTTGCCAGAACTCCTCGGGTTATCCATTATCATGCAGCCCAGGTTGGAAC |
| | GACACCTCTGCCTGTCCCCACACTGCCCATTCTCTTCTCAAAAGCCAGGTGG |
| SEQ ID NO: 398 | ATTTCTCTAAGTGTTCAATAGAACATCTTTCTTGCCAAATAGAATTACTAAATGACAAGGAA |
| | AGAAAAAACATTTAAAATACCTGCCTGATGGCCTAATTTGTTTTAGGAAAACATTATTTGTA |
| | ACAATAAATAGGTCAAGATAAATAGAGACTAGCTTGTGATAAGAAGAAAATGGAAGGAAT |
| | CAAATGGTTCCAGAAGCAATAATAGAAAAGACATATTGCAGGAAATTGAATTATTTATACC |
| | ATATCTGTATTTTAATAAATTAGCACTAGAAGAATAATAACAATAAGTTAGTTTA |
| SEQ ID NO: 399 | CAGTCCTCCCACCTCAGCCACCTAAAGTTCTGGAATTATAGGCGTGAGCCACCGTGCCTGGC |
| | TGAATTATGAGGATCAAATGACATCATGTACACAAAGGCCTTAGAACAGCAACTTACACAT |
| | TATAGGTGCTCAGTAAATGCTCATAGTCACAGGTTAGGTGCAGTTGGGAGCTGTGGAGAAA |
| | TATAAAGTACAATCTCTTGCCTTTAAGGAGGTTGCAGTCTAGATGGGGTGAGAGGTAATAA |
| | GATAGAAGATCATGTAAATCACAATGTTGGGAATGCATGTAAAATAATACTGGCT |
| SEQ ID NO: 400 | ATCTAAATCTGTGTATATATCTACACCATCTACTCTACATTGGCATCTACGTAGTCGACAGC |
| | TACCTCTACAGCATCTACAATATCTATGTCAACTACATCGACGTCATCCACTCCATGTACAT |
| | CATCCACATCTACGGGATCTAAACTTTGCATGCACATCTATATCTAATTATATAGATGATAT |
| | AACAATCAACACATGCTTGTTATATCAAAATGAGTGGTCCTTTTAGACTAGAAAGCAAATCT |
| | AATTTTAATTTTTCCCTCCACTGGCCACACACATAAAACGTGAGTGGAACAG |
| SEQ ID NO: 401 | TTAAGAGGGACAGCGATGCTTATTTCACTGTCTATGTGTTTATACCTGATTCTTTCAACCAG |
| | GGAGACAGCCTGACCCATGGAGAAAGCACGAGTCAAAGGTCAAATGCATCCACCTGCAGG |
| | TCCTGTCACTGACCACTTAGCATCCCACAATATCACTGAACCTCAGTTTGCTCATACGTAAA |
| | ATAAAATTTTAAAAAATAGAAAATGTAGGTAGCGTGTCTAGCTCAGATGGCTCTAGTCCCTT |
| | ACTGTGACCCAACCATTTCTAATTTGGCACAAGTTACAATAAAAAACAAGCGTG |
| SEQ ID NO: 402 | AAAAAAAAAAAGCAAACTAACAAAAACCACCCTGATACGTAGAGCTGGGGAATGGCATGA |
| | AGGAAGAGTTGTCATGCATAAAAGTCCGATAACAGAAACTACCATGAAATACTCCACAAAA |
| | AACACAACCTTGCACAGAGACCATTGCAACCTTACACAAAACATTTCTGCAAGGACATCTG |
| | CCCAGCAACTGCCTGTCCAGCCTCGAACTGGTGTCACCCTAGTTGTGGATTCTTGTAGCCAA |
| | GGACAATTATTTCAAAACAATTATGTAATCCTCCTTTTTTTTCCCTTTATTTGTCT |
| SEQ ID NO: 403 | AGATTGTCTCAAGAATCCTTAAATCAGGAAGGGCCCAGAGGCCAGGGCCTTTTCCTTCAAC |
| | ACAGCTCTGTGAATCCAAGGCCTCATCCTTTAGGACCTAAGCTGGGTCTGGAATTTCCAGAC |
| | AGAATCAGGTCTCAGTTCAGACTGCCAACCCATCAGGTCAGTTTAGAACAGATGTGGCCAG |
| | AGCTGTCCCTTCCCTTGCTTCCCCCTGAGAAAGATACATGAAGCCTTGGAACTATAGCAACC |
| | ATACTGTGACCCCGACACGATGAGCATGAGGACACGTTAAGGATGGCAGAATGG |
| SEQ ID NO: 404 | TACAATCCAAGGGTTGGCTCAGGCTGTATTCTCATCTGAGCACTCTACTGGGGAGGGTTTCA |
| | GGCTTACCTGATGGTTGGCGGCATTCAGTCCTTCTAGACTGTCAGACTGAGGGCCTTGGTTT |
| | TTGCTGGTGCACTCAGTTCCTTGCTTCATATAGAGTAGCTCACAATGTAGCAGCTTGTTTCAC |
| | TAAGACAGCAAGGAAGAGTGTTTCCTAGTAAGACAGACACTGTAGTCTTACCTAATACAAT |
| | CATGAAAGTGACATACTGTCTCCTTCGCCATATTCTGTTAGAGACAGGTTAC |
| SEQ ID NO: 405 | TGGCTCAGCTTGGATCAAGTGCCCATCCTGGTCCAAACAACTGTAGCAGCACATCTGTGTAT |
| | TTGTGTATCTTGTTCCTCCATAATCTTGCAGTCCGGGGAAAGTGTGCAGATGGATGGGTCCC |
| | TGAAAAGCAAGAGTTGTTTAGACAACGCTAGAGGTGTTCAGTTCTGGGAGACAAGAGTTGG |
| | GCCAGGTTGATAACTAGCCTAAGAGAGTCGGAATCAGATGAATAAGAACTAGATCTTGGGT |
| | GACAACCTAGATCAAGAGTCTTGAGGTTCAGTCATTTCAAAAAGCTCAAGTCTC |
| SEQ ID NO: 406 | GGGATTCACCAGGGCACAAGGCGACGTGCGTCTGTCCTCACGGAGCCTAAGTGCTGGTGGA |
| | GACGGACAGTGCAGATGCCAACCGCAAATGACGAGGCACTTGCAGGTAGGGGTCAGCGCC |
| | AAGAAGGAAATGAAGGGTGCGTGTCGCTGACTGAGACTCTGGTGGGAGCTACTTAAATAGG |
| | GCCATGGGGGAGGGCCTCTCTGAGGAGGTGACATTTGAGCTGAGGCCTCACCAATCAGAAG |
| | GAAAAAGCTGTAAAGGGTCTGGGATTAACTCAACCTGGGGACTTTTAAAATAATGTA |
| SEQ ID NO: 407 | CGTATGAGAAATGAAGACTCTCGGGCGCTGCCTCTACCTACTGAATTTTAGCAAGACTACCA |
| | GGTGTTCCCCATGCACATCAAACTTTGAGAAATGCTATTCTAGGTTGCTCTCAAGTCTGGCT |
| | GCAGATTTGAAACACCTGGCAAGCTTTTAAGACACGTACCAACGCTAGGTCTGGAGGTGGA |
| | GGGGCTGTTTGTTGGTATTCATATTTTTTAGCTCCTCAAGTGACCCTCATCTAATCCTTGGAT |
| | CCCCATCCAGCCTTTCCACAAACTCTATGGGTTCTGACCTTAAAATATAGCC |
| SEQ ID NO: 408 | TCTAGCCTGGCACAGTGCAGGCACGTGCCTGTGGTCCCAGCTGCTTGAAGTGGGAGGAGAG |
| | CTTCAGCTCAGGATTTCCAGGCTATAGGGAGCTGTGGTCCCACCATTGCACCCCAGCCTGGG |
| | TGACAGAGTGAGACCCCATCTCAAAAAGAAAAGAAAAGAGGCTAGGCGCAGTGGCTCAGG |
| | CCTGTAATTCAAGCACTTTGGGAGGCTGAGGCAGGCGGATCACTTGAAGTCTGGAGTTCGA |
| | GACCAGCCTGGCCAACATGGTGAAACCCCCCCATCTCTATTAAAAATACAAAAATC |
| SEQ ID NO: 409 | AGCCTTGTCTTCTGCCACCCCACTCAGCCTTCAGATTCACGTCTCTAGATTCTTGAGGTTGGG |
| | AAATGTTTCTCTAGCAGCCATGGTTTTGCATTCATTGGCCATTCAGGTTTTCTGCTTTGCCAT |
| | CTTCCCCCGGGGGTTTCCTTATCCTCCTGGAAGCACAACTAGGCATTTAAGTCCATGTTGAC |
| | TGTATTTTACCTGCTATTTCTATGTGTTTTGCAATAAGGGCTTTTCAAGATACCCATAACTTG |
| | TGGCTAAAAATGAGGTTTGTTCCAATGTGCCTTAGAAATATCCAGTTTC |
| SEQ ID NO: 410 | CCTGACATCTCAAAAGCCTATAGAATGCCTCTAAGTTTTTCTCTGGAGGATCAACTGAGAGA |
| | TGCATTCCTCCGTGAAGGCTTATATCTCATTGGCTGAGGGCTACTCTGCAGGGGTTACCTAT |
| | GTTATCCACCCCCACTCCACTCCTGCTACAATATGCATTAATTAGTGCCAATTCTTGGGCATT |
| | CTTGGCCACAGAGTGAGGGAAAGAAATCTGTTTTAGGAGAGATACTGTCAGCTTACAGTGA |
| | GTTGAAACCCACACAAAAATATCTACTGCACTTGTTGCCGAATTCAATGGGG |
| SEQ ID NO: 411 | GTTCTCTGATGCTGATGGAATCAAATTAGAGTTAAATACCAGGGAAATCATACAAAATTTTC |
| | ACACTCAGAAATTAAGCAAGATACTTCTAAAAATACAGAGATTAAAAAAGTCTTACAAAGA |
| | ACAAAAAATATGTTCGGGTAAATGAAAATAAAAAGAGAATATACCAAAATTTCTGGGATTC |
| | AGGTAAAGCAGTGCTGAGAAGGAAATTTATAGCACTAAACACTTACATCACAAAGGTGGAA |
| | AAATCATGAATCAACCATCTAAGCTTGCAGTTTAAGAAACTAAGGAAAAAAATAT |
| SEQ ID NO: 412 | TGAATCCATTATGGAAGTAGTATAGACTATTTTAGAATGATCCTTAGCTATATTACTGTTATT |
| | TCCTATTTTAAGCTTTGAGAAAAACTTGTTTTCAACTCTCAAGCAGTTCATGCCAGTTCCTGG |
| | AATAAAAAGAACATCTGGGAAAAATCCCAATTAGTGTTGTTTTGTCCTAGTTCTCTTATTTC |
| | CAGTTTTTCCTTAGAGATACAAACGAAAGACCCCTAATTATAGATTTTAAAGTTTTCCTTAT |
| | CCTCTTCCATTTGGCTACTAGGTGATTCTACTGTGTAAAAACTTAGCTCC |
| SEQ ID NO: 413 | GTAATCAAATATGGGCTATACTGCTTCTCCTGCAAATAGGTGATCAGAACATGGACAGGAA |
| | AGACACACCAATTTCTATTCCTCTGAGAAGGGTGCTGGGGATAGATCTGGGGCCTAAACTG |
| | TGTTCATGTGTTTTCTTAACTAAAACAATTTTTTTAAAAAAAAGAATCTGAAGCCATTATAG |
| | TAGAATAATGTTAATATGTATTCACTCTGGGTGGTGGGTACATGGATGTTTGTACTTTGAAA |
| | TATCTTCGCATTTTTAAATATTATTCTGTGAAAAGAAGGGGAAGACAAAATGTA |
| SEQ ID NO: 414 | TCCGCGGACCAACTCTCGCGACAGCCAGCTCAAAGCAGGCAAGAACCGGAAGGGGCGGGG |
| | ACGTTCCCCGTGAGCCTTCGCGGTGCTGGCTGCTCATCTGCATACGGAAGTTCGGCACATTA |
| | TGAATTATTTATTTTCCTCGAGGGAAAAAATTAAATGAAAAGCAACAAAATACATTATTAA |
| | CAAGTGAGACAAACTTCAATGGAACTGGATCATGACCTCAACAGTCAACTACGATAGTCAT |
| | CATACGCCTAATGAGAATAGAATTCATTACCTAGGAAATAAACTAAAAACGTCCTT |
| SEQ ID NO: 415 | CAGACACAAACAGACAAAATTGCTAAGTTTTAAATGGCTCCTGAGAAGTGGGAATTGGGGA |
| | TGTGAAATGGCCTTTGCAAAAAGTGTAACAGTGACAAAGTTATGGCAGTGTGTAGATCTGA |
| | CCTAACTGACTCCATCTTGCTTCTGTGTTCATTCCTGGGCATAGGCCAAACTAACTTTGGGA |
| | AGAACTTTAACTTTGACATAAAGATTGTAACAGCCCTTTCCTGAAACAAACCCCATTCTTGC |
| | ATGGGAACCACACTGCCTTTGTAGGACTAACACATGAGCCACAATATTATGGTT |
| SEQ ID NO: 416 | CCTGACAATTTCACAACCTAGGAAGGATGTTGAGCAACTGGAATTTTTATATGTTGCTTCTT |
| | AAAACACAAACTGGACCTTTCTTTCAATGTTAAATACATAGTTTACCCAAAGGTGGAAAAC |
| | CTTATCTTCACACAAGAATCTGTACAGGAGTGTTTATGGTAGCTGTATTCATAATTGCTTAA |
| | AACTGGAAGCAAACCAAATGACCTTCAGTGGGAAAATGGATAAACAATATGTGATAGAAG |
| | TATCACAGATGTTTACATAACCTGTGATACTTAGCAGTAAAAAGTAAACTAATAA |
| SEQ ID NO: 417 | AAGATTACCAAATGAGTATTGAATGGCTTCAAAGCTGTTTCCCGGGCACCCCCAAACCCTA |
| | GATTCCCTTGAATCTTTCCTGATTCAGCCTGGTCCCTGGTAGGGAAGGACCCCAGCCTTTAG |
| | GAAATATGGGAGAACTGGAGAAATAAAGCAAAGGGGAGGGCGGTGGCAGTGTGGTAAGAA |
| | ATAAGTCGAAGTAAATTGGGGACACTTAAGCTTTCAGTTCCTTTAAACATCTGTTTCCTTTG |
| | GGCAATTCACACTTCCAGAAGAGTTCTTGAGATGCCGTTTAAAGATAAAAAAAAG |
| SEQ ID NO: 418 | TTAAATCCGGGAGGCAAAGGTTGCAGTGAACCGAGATCACGCCACTGCACTCCAGACTGGA |
| | CGACAGAGCGAAACTCCATCTTAAAAAACAAAACAGAACAAAAAAGTGAGAACATACGAT |
| | GTTTGCTTTTCCATTCCTGAGTTACTTCATTTAGAATATAATGGTTTAAAAAAAAAAGAATA |
| | TGATGGTTTCTTTCCTTCCTCCCTTTCTTCCTCCTCCTCTTCTTCTTTCTCTCTCTCTCTCTCGC |
| | TCTTTCTCTCTCAGTAAAATAACCTAATTTATTTTTTTAAATTCCCAGTACC |
| SEQ ID NO: 419 | AATCCCAGCAATTTGGGAGGCCGAGGCAGGTGGATTGCCTGAGCTCAGGGGTTTGAGACCA |
| | CCCTGGGTAACACGGTGAAACCTCCTCTCTACTAAAATACAAAAAATTAGCCGGGCGTGGT |
| | GGCGGGCACCTGTAAGTCCCCTACTTGGGAGGCTGAGGCAGGAGAATCATTGGAACCCAGA |
| | AGGCAGAGGTTGCAGTGAGCCAAGATCGCGCCACTGCACTCCAGCCTGGGCAACAGAGGG |
| | AAACCCTGTCTCCAAAAAAAAAAAAAAAAAAAGAATATTCTTGAAAAAAAAGAAATA |
| SEQ ID NO: 420 | AGTTCCCTGGAGAAGCCTCTCCTTCTTCCAAGTCCCAGCCTGAGGCCTCTCCTCTTCTAGGTG |
| | AACAACACCAATCTGCAGGATGTGAGGCACGAGGAAGCTGTGGCCTCACTGAAGAACACAT |
| | CTGATATGGTGTATTTGAAGGTGGCCAAGCCAGGCAGCCTCCACCTCAACGACATGTACGC |
| | TCCCCCTGACTACGCCAGCAGTACGTACTCATCAGCCCCTGTCCCTGGTCTAAAGCTCTGTC |
| | CCCTGGTTTCTGGAGGGGAAGAAGTTCATACCCTTTGTTAAGAGAGGGCAAGC |
| SEQ ID NO: 421 | ATCCTTAGGGTATTTAGTCAGAATGGAATATTATGAGTCAAAGATATTGATCAGAAGTCAGT |
| | CGAAATTTAAAATATCTTCTCTTGGATTTATTTTCTTCATAACTATTATCATGCAATAATGAT |
| | GCAAATGCAGTACAAACAAAAACATAGATGAACACAGATGCATTTGCTTGATAAGTACAGA |
| | CAAGGAAACAGCATGGTAGAAATTTGCCCAACTAGACTTTCATTCTAGTAGCTAAGCTTTAT |
| | GCTTTTTTTCTTAACTTGATATTTTAAAAACTTGAAAAAAAAAAGAATCAGT |
| SEQ ID NO: 422 | TGAAGTGTGAGTTTGTGTTTGTGCGTGTGCTGTGACTCTTTGATGTGTGGTGGAAGATTTCTG |
| | GGAACTAATTTTAGTTCCTGAGTTCTAATTCTAGTTGAGTCTGAGATCACCACAGGTAGTGT |
| | CACTATTTTGAGCAATTGTACAATTTCTTTACATTATCCCCAAAAGGCCTATGCCCACATAG |
| | GTACACAGGAGTGCTAATCAATGTAGTGAGTAGGTAAAAACCCTGTTTTTGTCTTTTGTAAG |
| | TTTAAACTGTTTTCTGTCCCCTAAAGAGAAACCCTTAAATAAAAATGATGA |
| SEQ ID NO: 423 | TAGCTTGAACCCAGGAGGTGGAGGTTGCAGTGAGCTGAGATTGCACCACTGCACTCCAGAC |
| | TGGGCAACAGAGCAAGACTCTGTCTCAAAAAAAAAAAAAAGAAAAGAAAGAAAAGGAAA |
| | AAAAAGAAAAACAAAAGTTGGTTGCTTTCTGTAAATGTGACCAGATTTGAATGAATGCATG |
| | TAAATCTATGCTGTACTTTGCTGGGGAGGTTTTTGTCAGGGATAAGGATGGGGGCAAACTAT |
| | GTTAAGGGAAGTGATGACAAGAAAGCCTTCCCTGCGATTAAGAAATTATAATAATAT |
| SEQ ID NO: 424 | GAGACATTGGACCAGCACCTTTTGTTCAAGGTGACAGTAACATAAGCCTGCTCAAATAAGT |
| | AACATTTCCCTTTGCCACTGGCTCATTTGAGTGGAATGACAAAGTTTGCTTGCGTTTGTGTG |
| | GACAGACCCACACAACCCTGGCACTGATAAATATTCAGTATGTCTTTATGTTTTCACACTAA |
| | GCAGCACTGAAAAGTGGTCAACTTTTTGTTTGTTTTTTGTTTTAGAGAGACATCTGTAATCCT |
| | GCTGATGCTCATGTGCTGAAAACTATGACCGTACTCAATAAAGAAGGAGACA |
| SEQ ID NO: 425 | CCTTAGGGTATTTAGTCAGAATGGAATATTATGAGTCAAAGATATTGATCAGAAGTCAGTC |
| | AAAATTTAAAATATCTTCTCTTGGATTTATTTTCTTCAAAACTATTATCATGCAATAATGATG |
| | CAAATGAAGTACAGACAAAAACATAGATGAACACAGATGCATTTGCTTGATAAGTACAGAC |
| | AAGGAAACAGCATGGTAGAAATTTGCCCAACTAGACTTTCATTCTAGTAGCTAAGCTTTATA |
| | CTTTTTTTCTTAACTTGATATTTTAAAAACTTGAAAAAAAGAAAAGAATCAGC |
| SEQ ID NO: 426 | TCCAGAAGACCGAGAATGGCTGTTAGATACAATAGAATGCTCTAAGAGTCACTATCAAAAA |
| | TGAGCATATCAGTGCATAAAATGTGTGGTAGTTTAGCAGTTATTTCATTGTTTACCGTAGTG |
| | TTTTTTCTTACAATTTTGTAGAAGCCTGTGTCAGAATTAAGAACTTTTTTAGAAGAGAATAAT |
| | CATGGATGATTGAAATTAACATTTTAAGCTGATACTGAAAATTATTCTAAATTCTATTACAT |
| | TTCTATTTGTATTTTCTTTCAAAGGCTAATGGAAGTCTTAAAAAGAAAATGG |
| SEQ ID NO: 427 | ATAAAATTCCAGAAGACCGATGATGGCTGTTAGATATAACAGAACGCTCTGAGAGTCACTA |
| | TCAGAAATGAGCATATCAGTGCATAAAATGTATGGTAGCTTTATTTAGCAGCTGTTTCATTG |
| | TTTACCATAGCATTTTTTCTTACAATTTTGTAGAAGCCTGTGTCAGAATCAAGAAGTTTTTTT |
| | TAGAAGATGATAATCATGGATGATTGAAATCATACTGAAAATTATTCTAAATTCTATTATAT |
| | TTATAGTTGTATTTTCTTTCAAAGGATAATGGAAGTCTTAAAAAGAAAATGG |
| SEQ ID NO: 428 | CAGAGCGAAAATGACTGTTAGATACAATAGAACACTCTAAGAGTCATTATCAAAAATGAGC |
| | ATATCAGTGTGTAAAATGTATGGTAGTTTTATTTAACGGTTGTTTCATTGTTTACCGTAGTGT |
| | TTTTTCTTACAATTTTGTGGAAGCCTGTGTCAGAGTTAAGAACTTTTATAGAAGAGGATAAT |
| | CATGGATGATTGAAATTGACATTTTAAGCTGATACTGAAAGTTATTCTAACTTCTATTACATT |
| | TATAGTTGTATTTTCTTTCAAAGGATAATGGAAGTCTTAAAAAGAAAATGG |
| SEQ ID NO: 429 | GAAGGCTGGGAAAGGCTGTTAGATACAATAGGGTGCCATAAGAGTCACTATCAAAAATGA |
| | GCATATCAGTGCATAAAATGTATGGTAGCTTTATTTAGCAGTTATTCCATTGTTTACCATAGT |
| | GTTTTTTCTTACAATTTTGTAGAAGCCTGTGTCAGAATTTGAACTTTTTTAGAAGACAGTAAT |
| | CATGGATGATTGAAATTAACATTTTAATCTGATACTGGAAATTATTCTAAATTCTATTACATT |
| | TATATTTGTATTTTCTTTTGAAAGCTAACGGAAATCTTAAAAAGAAAATGG |
| SEQ ID NO: 430 | AACTCACCGAGCCTGGGGAATACGACCCACTTATAATGTCCAAGACCTTCCTCTCATCCCAA |
| | GTTTATGACAATTTCCACCCATAATCAAAATTTCCTAAACTTACTTTCTGTTTTTTTGTTTTTT |
| | TTCATTTGGTAGAGACAGAGTCTCCTTCTGTTGCCCAGGCTGATATCAAACTCCTGAGCTCA |
| | AGGGATCCTCCCACCTCAGCCTTCCAAAGTGCTGGCATTTCAGGCATAAGCTACCGGGCCTA |
| | GCCTTACTTCACTTTTCTAAGAAACAGTATTATTACCTCATTAGTCAATA |
| SEQ ID NO: 431 | GCAACAGAAAACCTTTTTTTGAGGAGTCCCTAAGGCTTCACCAGTTTGTCAAAATTGGAGCT |
| | TGATTGCTGAGACTTTATTTGCATACCCACAATGCATTGTGCACCAAATAATTTTCGTCTTTA |
| | AAATTACTAGTCCCCTTTTTCCTTCAATCTATCTTTCCTGAAACTGAGATTGCTGTTCCAGAA |
| | TTGTCTGAAGAAAAAGGCAGAAGTCAATAGCTCTTTTGGGCAGAAAGAAATTTACCATTAG |
| | CCTGTTGGGAGTAGCCATTACCTGAGAACTGAGTGCCACTCATCGAAGTTC |
| SEQ ID NO: 432 | GAGCTTGCACCACTGCACTCCAGCCTGGGAAACAGAGCAAGACCCTGTCTTAAAAAACAGA |
| | TAAACAAGCAAACAAACTTAGACAAAGAGTTACCAAATGATCCAGAAATTCTACCCCCCAA |
| | AATATACCCAAGAAAATAAAAATATATATCCACGCAAAAACTTGTACATAAATGTTCATAG |
| | CAGCATTAGTCGTAATAGCCAAAAGTAGAAACAAGTATCCATCAACTGATGAATGGATAAA |
| | TAAAATGTGGTATATCCATATAAAAGAATATTATTTGGCAACCGAAAAAGAAGTAT |
| SEQ ID NO: 433 | GATTGGTCGGTTGAGTGGCAGAAAGGCAGACGGGGACTGGGCAAGGCACTGTCGGTGACA |
| | TCACGGACAGGGCGACTTCTATGTAGATGAGGCAGCGCAGAGGCTGCTGCTTCGCCACTTG |
| | CTGCTTCGCCACGAAGGGAGTTCCCGTGCCCTGGGAGCGGGTTCAGGACCGCTGATCGGAA |
| | GTGAGAATCCCAGCTGTGTGTCAGGGCTGGAAAGGGCTCGGGAGTGCGCGGGGCAAGTGA |
| | CCGTGTGTGTAAAGAGTGAGGCGTATGAGGCTGTGTCGGGGCAGAGGCACAACGTTTC |
| SEQ ID NO: 434 | CGGAAGAACCCCGAGTCCACTGTAAGCTCAGGGGAGAGCGGGAGCCAGGGAGGTGAAGTG |
| | CGCAGACTCGGCAGAGGCGGCGGGCAGAACCGCGCGGGGGTGAGAGGGCGCGGTGGCTGC |
| | GGGGCGGGAGCCGCTGCTGAGAGGCGGCCTGGGTTGTCTTGTGGGGTGACTGTCGGTGGAA |
| | TCTTTGGTGGAGAGTGGTTTGGAAGAATGGCGAGGGGCGGCAGTGGGGAGGGTGGTGACCC |
| | TGAGCGACCGGCCAGGGCGAGGAGGCTGTGCTGTCCCTGCAAGCCATGTGCTCATTTC |
| SEQ ID NO: 435 | TGTTAGTTACCTTGCTGTTCCTTGATAAAAAGCTACCTTCTTACATATCTTACTTCCAATAAA |
| | GAGGCAGATTCCCTATGTACTGTTTATCTCGGGAAAGAAATACATGTGGGAAAAGAAGCAA |
| | TTTTCTTCTCATTGCAATTAAATTAAATCATGACCACCTGTTGTGGGATTATCCTGCCATCTG |
| | CTGTTCAAAAGAGAAACAACAGCAGAGAACCAGAAAGAAGAGGCAAAATGTTGGAAAGCT |
| | TTGCTCCCAGATGTCCATCAGTTGATTACGGTTATTGGTATAGTTAAAATTTT |
| SEQ ID NO: 436 | GGTGGATCACCTGAAGTCAGGAGGTCGAGACCAGCCTGGCCAACATGGTAAAACCCTGTCT |
| | CTACTAAAAATACAAAAATTAGCCAGGCATAGTGGTACGCACCTGTAATCCCTGCTACTTA |
| | GGGAGCTGAGGCAGAAGAATCACTTGAACCTGGGAGATGGAGATTGCAGTGAGCCAAGAT |
| | CACACCACTGCACTAGCCTGGGCAACAGAGCAAGACTCTGTCTCAAAAAAAAAAAAAGTGT |
| | GTGTGTGTGTGTGTGTATATATATATATATAAACATAAACTCACTAACATAAGTTTA |
| SEQ ID NO: 437 | CCAAATATGACATAAATACTTGATAAATTTTCTGGTAAATATATTTTAATGGAATTTTTTTAA |
| | CTGAGGAGACATTTGAAAGTTACTTGAATAAGTTCCAATGAATAAATACATGGACAGAATT |
| | TTAATCTCTGGAATTTGTGAGATGGGGTTTTTACGAGTCTTTGACAAATTTTCCTATGTTTAA |
| | GACTTTTCCTAAGTATTTGTATGTATGTTGCTTCATGTGAAACAACCTTTTTAAATTTGAAAT |
| | TAATAAAATGGGTTTTTCAATCAACTCTGAGTGAAGATAGAAAAATTTAT |
| SEQ ID NO: 438 | AGTCAAGTGCCTCTCTCCATTTACTGGTAAGAGAGAGAGGGTTTAGAGGAACTCTTGTTCCG |
| | GCGCTCAGCTCATTTGCATCCCAGAATGCATTGTAGATACGAGAATTATTACCAGGGTTATC |
| | TGTTTGAATAATAATATTTAAACTTTTTTTCTTTGTCAGGAGATTTTACCCAGTGAGAACATG |
| | TTTAGGACACTTTTCTACAGTGGAAGAAAAGCTTCTGTCTGCAGGTCCAAAGGCACCGTAA |
| | GTAGAGGGAGACCAGTCAATAGCTGGGAAGCCAGGCAAAAGGCTAACAGGCA |
| SEQ ID NO: 439 | GCCCCCTGGTGGTGGCCTAACGCCTAGAAAAAGTAACGAACTATTTAAGGTATTTCTGGAA |
| | ACCGAGGGGGTGGTGACTCAGCGTCATTTACATACCCACAATGCACTGCACACAGACCACG |
| | TCCTACTTTAAAAGGAGATTCTCCCTTTTTTCCCCCTCTTTTCCTTTACCATAATAACGAAGC |
| | TCCTTTCACACAATCGTCTGAGACAAAAACAGAAGTCACTCTTTTGGGTTAATAGTAACCAT |
| | TGCTAATCTAGTAGTGACCGTCCCCCGAGGACTGTGTGCAACCATTCCAACAC |
| SEQ ID NO: 440 | CAGCAGAGAGGAGCATAGGAGAGCAAAGGAGATCAGTGACCCATGGCTTCCCCGGTGGCG |
| | CGGAACAGCCCGGAGCCGCCTGTGATTTGCATACCCATGGTGCACCACGAAAAGATACCCT |
| | CAAGATGCTTGCACTCCCTCTGTGCGCGCATTTCTGCACTGTTTTAGAGCATGATGCCTCTTA |
| | CACGCATCTGTGTGCATAAACTACATATAGGGAGTGCGTACCACGCAGGCATCCAACAACC |
| | ATAAGTGTGTTAAGTGTTAGTTCTCCCTGCGAGGTTCGAAGCGGAAGTCACGAAT |
| SEQ ID NO: 441 | CCTGTGAGGGTGGAGTGTAAGGAGACCATCAAACGACCTGAGAGAATGTGCTCAGCCATCC |
| | ACAAAGTGCTATTGAAAGCAGGGGGCTTGAGGAAGAATGTGGACCCTGGAGTTCTAAGACT |
| | ACTGTGACAGTTTTATTCCCCAGCCATGCCTGGCCCAGAGTCTGGCCTGGGGGTGTGGCTGG |
| | TGCCTCTGCACTACTCTTGGGCCTTCATGGATTCTGCCAGCAGGTGTCCTCAAGGTGCCCCC |
| | AAATGAATTCGCTGCCATTGGGCAAGATCAGGCACTCAGTAAAAATTGAAAAAC |
| SEQ ID NO: 442 | TAATTCAAGTCCTTTACCAATTGTGTGGTTTTGTGGTTTAAAACATGGCTTACCCTTATCTAT |
| | CACAACAATTTTCTAATTTCTGAAAAGTCCCTCCTTCTCTGTCCCAATTCCATACTTTTCTGT |
| | TCCACATGAAGTTGAGATACCCAAACTTGTTTAAAATAAATTTAAAGTATCTGGAAAATTAA |
| | TTTAACAATCCTTTCAGTAATTTATTCTGTACATTCACAACCAAGTACTTTTCAGAATGGTTA |
| | TAAAACCTCAGGAATATATGAAATTTATGAAATAAAAAAAGAAAACTTC |
| SEQ ID NO: 443 | AAAATATTCATTAAACCATACCATAAACAGATGTGCTATCATCCAGGCTTTGCTGTTCCATT |
| | TCTAGAGCACAGGCAGAGTAGATTTAGCATAATTCTGAAGGGCTCTAGGATTTTCAGAATG |
| | GCAAATGAGCACTGATTTCAATTTAAAGTCACCAGCTGCATTAGCCTCTAACAAGAGAGTC |
| | AGCCTGTCCTTTGAAGCTGTGAAGCCAGGCATGGACTTTTCCTCTTTAGCTATGAAAATCCT |
| | AGATGACATCTTCTTTCAATAGAAGACTGCTTTGCCTACCCTGAAAATCTTTGT |
| SEQ ID NO: 444 | CATAATATTTATGTCTGCAAAGGTTATGAGGACAAAATATGCTAATATGAGTCAAGCATTTA |
| | GAATGCCAGCTGGCCCTATAAATGTTAGCTACTATTATGGTGCTTTAGATGAATTCAGATAT |
| | CACTTTAAGTTCTAATGTTCCATGATTCTGGAATTAATAAAATACTGTGCAAACAACAGAGA |
| | ACCATCTTTACTATGAAATTAACCCAGTTTGTGTCTTTGCCTTAAACAATTCTAAAGTGATTC |
| | TCAAAGTTCGTAAGCCAAGAGAGTGGCTTTTAGTTTTTAAAGGACTAAATC |
| SEQ ID NO: 445 | CTGCCTCATCCTCCCTAGTAGCTGGGATTACAGGCGTGTGCCACCATGCCCAACTAATTTTT |
| | TGTATTTTTAGTAGAGACAGGGTTTCACCATGTTGGCCAGACTACTCTCAAACTCCTCACCT |
| | CAGGTGATCTGCCCGCCTCAGCCCCGCAAAGTACTGGGATTACAGGTGTGAGCTACCGCAT |
| | CCAGCCAGAAAGGTAGATTCTAATCTGATCTGTGTCTTCTAATGCCCACTGTTCTCCCATTG |
| | CTTAATATCACCGTATGTTAGGCTGTTCTTGCATTGCTATAAAGAAATATCTA |
| SEQ ID NO: 446 | TCAGCTTCATTCTCAGACATGCTCTCCCTCACCATGGTGGCAGAGGTAGCTATCAGTACTGG |
| | GTTTCTGTCATTCTCACAGCTATGGGTGCCTCTTTTGCCATACTTCTAGCAGTAGTGAGTACC |
| | AAGGAGGGACCTTGACCAGCCCAGATTGGATTGCCTGCCTGAATCAGCATGGCCAGAAATA |
| | TGCAGTAGACAATAAGCAGCATCACTTTGGCTAAGGCCTGTTCATGTGTCCCATGAGAGAG |
| | GGTAAATCCCACCAGAATTACACAGAACGGGTTCCCCATGGAAAAAGGAGGGG |
| SEQ ID NO: 447 | CAAAGTAGGAATCAGAAACCGTTTCCTGATGCTTTGCTTCAGCTTCCCAACTGCTTTGAGTT |
| | TTAAAGCTCTTGTTGCTGTCAGGAGTATACACTTTTCTAAGTAGAAGAGACCTGATGTCAGA |
| | GACACTGATTTATAATAAAAATAATTTTTACTTTGTGTTACAGCATATATAAGAACACATAA |
| | GAAGTGCTCCCAGTGGTTATTGATTTCTAAGTGGAATTAGGTTATAAATAATACAATGCAAA |
| | ACTAGATTTGTTAATGTTAAGGTATAGTTGTTTAACAAAATTATGATTTTCC |
| SEQ ID NO: 448 | GATTGTGCCACTGCACTCTAGCCTGGGTGACAAAGCAAAACCCTGTCTCAAAAAAAAAAAA |
| | GTTATCTCCTAAAATTTTGTAAAATTACTTTTTTTTCTCCAGGGGAGGAGAAAACATCAAGA |
| | AAACAAAAAGAGAAATATCAAAATCATTCTTTCGGTTCTTTTGTGGTTTTCAACCACTTTTG |
| | GGTTTTCCCCTTGCAGAAACCACAGAAATATTCTCTTAGAATAAAATAGTTTATCTGTTTAA |
| | AAAAAGAAAGAAAGAAAAGAAAAGAAAAGAAAAATGTGATAAATGTGATCTCT |
| SEQ ID NO: 449 | GACTCAAGTTTTTTTGGGAGGGAAACTGCCTTGCTTTCCTCTTCTATATATTACAGGGTCTAG |
| | CAAATTAAATTACACATGGCAGGCAATGAGTAAATATTTACAAAATCCTTTTTGAATAAGA |
| | AGATGTAAAGGAAATGTTCTCAGTTTTAAAGATTATTATGAGGTACTATGGCAAAATGGAA |
| | AAATATAGGCTCTGGATTGGACAGACCCAGTTTTGAATTTCAGTCACTTAAAAATCTCTTTG |
| | AACCACATCCTCTCCCTAAAGTGGGATAGTATGTACTCCTTAAAAATTGTTGG |
| SEQ ID NO: 450 | CCCACCTACCTGCAGGCCTCACCCCATGGGGGATGGCCTGACTTGGTCTCATTATTTGTTCC |
| | TCTATCCCCCAGGCCTCTTCCTTGGTGCTGGCTAAGGGCTAGGCTGGATGTTTAGTTGTAGC |
| | CCTAAGGAAAAATTTTAGTATGTCCACTTTTATACACAGAGGCACAGATGGTAAGCAGTTAT |
| | GAAAGTTGTCCGAATCAAAATGGAGTAATTTATGTTAAAACCCTGGCAAATGGAGCCAGGG |
| | AAGGCCATCAAGGGAGAGTTCTTACACATGAATGCCTGATAAGAACTGTCACA |
| SEQ ID NO: 451 | TCGGCTGAGTCGGCGGAGGGTGGGGCGGAAGAGCAGACGGGGACTGGGAAAGGCGCTGTC |
| | AGTGACATCACGGATAGGGCGATTTCTATGTAGATGAGGCAGCGCAGGGGCTGCTGCTTCG |
| | CCACTAAGGAGTTCCCGTGCCGTGGGAGTGGGTTCAGGACCGCTGGTCGGACCTGAGAGTC |
| | CCAGCTGTGTGTCAGGGCTAGGAGGGCTGGGGGGGGCGGGGAGGTGCGCGGGGCAAGTGA |
| | CCGTGCGTGTAAAGGGTGAAGCGTGTGAGGCTGTGGCGGGGCGGAGGTGCAAAAGCTT |
| SEQ ID NO: 452 | GGGTTCGGAAGAACCCCGCGTCCACTGTAAGCTCAGGGGAGAGCGGGAGCCAGGGAGGTG |
| | AAGTGCACAGACTGGACAGAGGCGGCGGGCAGAACCGCGGGGGTGAGAGGGCGCGTGGTT |
| | GCGGGGGGGGAGCCGCTGCTGAAAGGCGGCCTGGGTTGTCGTGTGGGGTGACTGTCGGTGG |
| | AATCTTTGGCAGAGAGTGGTTTGGAAGAATGGCGAGGGGGGCAGTGGGTAGGGTGGTGAC |
| | CCTGAGCGTCCGGCCAGGGCGAGGACGCTGTGCTGTCCCTGTAGGGCATGCGCTCATTC |
| SEQ ID NO: 453 | TTCCCAAGAAGGGTTGGGGACGAACCCCCTGTCCACTGTAAGCTCAGAGGGGAGCCGGGGC |
| | GAGGGAGGTGAAGTGCACAGACTGGGCAGAGGCGGTGGGTAGAAGCGCTGGGGTGAGAGG |
| | GCGCGGTGGCTGCGGGGGGGGATCCGCTGCTGAAAGGACGGCTGGGTTGTCTTGTAGGTGA |
| | CTGTCCGTGGAATCTTTGGCGGAGAGTGGTTTGGAAGAATGGCGCCGGCCAAGCAGAGGGG |
| | AAGGTGGTGACCCTGAGCCTGCGGCTACGGGACAGGAGGCTGTACTGTCCCTCCTCT |
| SEQ ID NO: 454 | CGGGCGGAAGAGCAGATGGGGACCGGGAAAGGCGCTGTCGGTGACATCACGGATAGGGCG |
| | ATTCCTACGTAGATGAGGCAGCTTAGGGGCTGCTGCTTCCCACGAAGGATTTCTCCTGCTTT |
| | GGGAGCAAGTCCAGGACCGCTGGTTGGACGTGAGAGTCCCAGCTGTGTGTCAGGGCTAGGA |
| | GGGCTCCGGGTGGCATGGGGGGGGGTGGGGGTGGGGGTGCGGGTGCGCGGGGCAAGTGAC |
| | CGTGTCTGTAAAGGTTGAGGCGTATGGAGCTGTCGCAGGGCGGAGATGTGTGAACTC |
| SEQ ID NO: 455 | GTGGCAGAGGGTGGGGCGGAAGAACAGAAGGGGACTGGGAAAGGCACTGTCGGTGACATC |
| | ACCGATAGGGCATTTCTGTGTAGATGAGGCAGCACAGGGTTGCTGCTTCGCCAGGGAGAAT |
| | TCCCCGTGCTGTAGGAGCAAGTCCAGGACCGCTGGTGGATGTGAGAGTCCCAGCTGTGTGT |
| | TAGGGCTAGAAGGGCTTGGGGTGGTTGGGGATAGGCGGGGGTGGTTCTCAGGGCAAGTAAC |
| | CGTGGGTGTAAAGGGTGAGGCATATGGAGCTGTGGCAGGGCGGAGGTATGTGGACTG |
| SEQ ID NO: 456 | AGAAAGGCAGACGGGGACTGGGAAAGGCACTGTCGGTGACATCACGGATAGGGCGACTTC |
| | TATGTAGATGAGGCAGCGCAGGGGCTGCTGCTTCCCCACCTGCTGCTGCGCCACGAAGGAT |
| | TTCCCGTGCCGTGGGAGCGGGTTCAGGACCGCTGGTCGGACCTGAGAGTCCCAGCTGTGTG |
| | TCAGGGCTAGGAGGGCTGGGGGTGGGGGGGGGGGGGGGGGGGGCTGCGCGGGGCAAGTG |
| | ACCGTGCGTGTAAAGGGTGAAGCGTGTGAGGCTGTGGCGGGGCGGAGGTGCAAGATCTC |
| SEQ ID NO: 457 | GGGTTTGGAAGAACCCCGCGTCCACTGTAAGCTCAGGGGAGAGCGGGAGCCAGGGAGGTG |
| | AAGTGCACAGACTGGACAGAGGCGGCGGGCAGAACCGCGGGGGTGAGAGGGCGCGTGGTT |
| | GCGGGGCGGGAGCCACTGCTGAAAGGCGGCCTGGGTTGTCGTGTGGGGTGACTGTCGGTGG |
| | AATCTTTGGCAGAGAGTGGTTTGGAAGAATGGCGAAGGGGGCAGTGGGTAGGGTGGTGAA |
| | CCTGAGCGTCCGACCAGGGCGAGGACGCTGTGCTGTCCCTGCAGGGCATGCGCTCATTC |
| SEQ ID NO: 458 | GCAGAGGGTGGGGCGGAAGAGCAGACGGGGACGGGAAAGGCGCTGTCGGTGACATCACAG |
| | ATAGGGCGATTCCTATGCAGAGGAGGCAGCTCAGGGGCTGCTGCTTCACCACGAAAGATTT |
| | CTCGTGCTGTGGGAGCTAGTCCAGGACCTCCGGTTGGACGTGATAGTCCCAGCTGTGTGTCA |
| | GGGCTAGGAAGACTTGAGGCGGCATGGGGGGGGGTGGGGGAATGCGCGGGCCAAGTGAC |
| | CATGCGTGTAAGGGGTGAGGCGTATGGAGCTGTGGCAGGGCGGAGGGGCGTTCATTC |
| SEQ ID NO: 459 | CGGGTTGGTCGGCTGAGTTGGCGGAGGTTGGGGTGGAAGAGCAGACGGGGACTGGGAAAG |
| | GCACTGTCGGTGACATCACGGATAGGGCGACTTCTATGTAGATGAGGCAGCGCAGAGGCTG |
| | CGCTTCGCCACATGCTGCTTCGCCACGAAGGAGTTCCCGTGCCGTGGGAGCGGGTTCAGGA |
| | CCGCTGGTCGGACCTGAGAGTCCCAGCTGTGTGTCAGGGCTAGGAGGGCTCGCGGGTGCGC |
| | GGGGAAGTGACCGTGCGTGTAAAGGGTGAGGCGTACGGGGCGGAGGTGCAGGAGCTC |
| SEQ ID NO: 460 | TAGGCTGAGCGGCAGAAAGGCAGACGGGGACTGGGAAAGGCACTGTCGGTGACATCACGG |
| | ATAGGGCGACTTCTATGTAGATGAGGCAGCGCAGGGGCTGCTGCTTCCCCACCTGCTGCTTC |
| | GCCACGAAGGATTTCCCGTGCCGTGGGAGCGGATTCAGGACCGCTGGTCGGACCTGAGAGT |
| | CCCAGCTGTGTGTCAGGGCTAGGAGGGCTGGGGGGGGTGGGGCTGCGCGGGGCAAGTGAC |
| | CGTGCGTGTAAAGGGTGAAGCGTGTGAGGCTGTGGCGGGGCGGAGGTGCAAGAGCTC |
| SEQ ID NO: 461 | GCCGAACGGCCTTTCCCCCGTCCTGCCCCTCGTCCACTGTAAGCTCAGGGGGGAGCGGGAC |
| | CCAGGGAGGTGAAGTGCACAGACTCGGCAGAGGCGGCGGGCAGAACCGCGGGGGTGAGAG |
| | GGCGTGGTGGCTGTGGGGGGGGAGCCGCTGCTGAAAGGAGGCCTGGGTTGTTGGGAGGGTG |
| | ACTGTCCGTGGAATCTTTGGCGGAGGGTGGTTTGGAAGAATGGCGAGGGGAGAGCAGAGG |
| | AGAAGGTGGTGACCCTGATCGTCCGCCAGGGGAGAGTAGGCTGTGCTGTCCCTCCTCT |
| SEQ ID NO: 462 | GCTGAGTGGCGGAGGGTGGGGCAGAAAAGCAGACCGGGACGAGGAAGGCGCTGTCGGTGA |
| | CATCACGGATAGGGCGACTTCTATGTAGATGAGGCAGCGCAGGGGCTGCTGCTTCGCCACT |
| | GGCTGTTTCACCACGAAGGAGCTCCCGTGCCGTGGGAGCGGGTTCAGGACCGCTGGTCGGA |
| | CCTGAGGGTCCCAGCTGTGTGTCAGGGCTAGGAAGGCTCGGGGGTGCGCGGGGCAAGTGAC |
| | CATGTGTGTAAAGGGTGAGGTATATGGGGCTGTGACAGGGCAGAAGTGTGTGAAGTC |
| SEQ ID NO: 463 | GCTGAGCGGCAGAAAGGCAGACGGGGACTGGGAAAGGCGCTGTCGGTGACATCACGGATA |
| | GGGCGACTTCTATGTAGATGAGCCAGCGCAGGGGCTGCTGCTTCGCCACATGCTGCTTCGCC |
| | ACGAAGGAGTTCCCGTGCCGTGGGAGCGGGTTCAGGACCGCTGGTCGGACCTGAGAGTCCC |
| | AGCTGTGTGTCAGGGCTAGGAGGGCTGGGGGGGAGGGGGGTGTGCGCGGGGCAAGTGACC |
| | GTGCGTGTAAAGGGTGAAGCGTGTGAGGCTGCCGGCGGGGCGGAGGTGCAATAACTC |
| SEQ ID NO: 464 | CAGAGATATAGAACAGACACTAAAAGGACAGTCCATAAAAGGACAAATAGATAATTTGGA |
| | CTTCATCAAGAATAAAAGGTTTTGCTCTGTGAATGACCTTGTTAAGAAGAGCAAAAGACAA |
| | GCCACAGACTGGGAGAAGATATTTGCAGATCATGTATCCACCAAAGGAGCACTACCTAAAC |
| | ATGTAAAGAACTCTCAAAAATCAACAATAAAAAACAAACAGGCTGAGCAGGAAACTGGAA |
| | AGAGACATGAAGAGACATTTCACTGAGGAGGATCCATAGAAGGAAAACAAGCACATAT |
| SEQ ID NO: 465 | GCTGAGTGGCGGAGGGTGGGATGGAAAAGCTGACTGGGACGGGGAAGGCGCTGTCAGTGA |
| | CATCAGGGATAGGGCGACTTCTATGTAGATGAGGCAGCGCAGGGGCTGCTGCTTCGTCACC |
| | GGCGGCTTCGCCACGAAGGAGTTCCCGTGCTGTGGGAGGGAGTCCAGGACCGCTGGTCGGA |
| | CCTGAGAGTCCTAGCTGTGTATCAGGGCTAGGAGGCCTCGAGGGTGCGCGGGGCAAGTGAC |
| | CGTGCGTGTAAAGGGTGAGGCGTATGAGGCTGTGGCGGGGCGGAAGCGTGCAGACTC |
| SEQ ID NO: 466 | GCCGAATGGCCTTCCCCCCGTCCTGCCCCTCGTCCACTGTAAGCTCAGGGGGGAGCGGGAC |
| | CCAGGGAGGTGAAGTGCACAGACTCGGCAGAGGCGGCGGGCAGAACCGCGGGGGTGAGAG |
| | GGCGCGGTGGCTGTGGGGGGGGAGCCGCTGCTGAAAGGAGGCCTGGGTTGTTGGGAGGGT |
| | GACTGTCCGTGGAATCTTTGGCGGAGGGTGGTTTGGAAGAATGGCGAGGGGAGAGCAGAG |
| | GAGAAGGTGGTGACCCTGATCGTCGGCCAGGGGAGAGTAGGCTGTGCTGTCCCTCCTCT |
| SEQ ID NO: 467 | GCTGAGTGGCGGAGGGTGGGGCAGAAAAGCAGACCGGGACGAGGAAGGCGCTGTCGGTGA |
| | CATCACGGATAGGGCGACTTCTATGTAGATGAGGCAGCGCAGGGGCTGCTGCTTCGCCACT |
| | GGCTGTTTCACCACGAAGGAGCTCCCGTGCCGTGGGAGCGGGTTCAGGACCGCTGGTCGGA |
| | CCTGAGGGTCCCAGCTGTGTGTCAGGGCTAGGAAGGCTCGGGGGTGCGCGGGGCAAGTGAC |
| | CATGTGTGTAAAGGGTGAGGTATATGGAGCTGTGACAGGGCAGAAGTGTGTGAAGTC |
| SEQ ID NO: 468 | GCTGAGTGGCAGAAGGTGGGGCGGAAAAGCAGAGCCGGACGGGAAAGGCGCTGTCAGTGA |
| | CATCACGGATAGGGCGACTTCTATGTAGATGAGGCAGCACAGGGGCTGCTGCTTCGCCACC |
| | GGCTGCTTCGCTACGAAGGAGTTCCCGTGCTGTGGGAGCAAGTCCAGGACCGCTGTTCAGA |
| | CCTGAAAGTCCCAGCTGTGTGTCAAGGCTGGAAGGGCTCCGGGGTGCGCGGGGCAAGTGAC |
| | CGTGTGTAAAAAGGGTGAGGCGTGTGGAGCAGTAGCAAGACGGAAACGTGTGAACTC |
| SEQ ID NO: 469 | CAGAGGGTGGGGCAGAAGAGCAGAGCCGGACCGGGAAAGGTGCTGTCGGTGACATCACGG |
| | ATAGGGCGATTCCTGTGTAGATGAGGCATCTCAGGGGCTGCTGCTTCGCCACGGAGGATTTC |
| | TCCTGCTGTGGGAGCAAGTCCAGGACCGCCGGTTGGACGTGATAGTCCCAGCTGTGTGTCA |
| | GGGCTAGGAGGGCTGGGGGTGGGGGTGGGGGGCGGTGGGGGGTTGCGCGTGGGAAGTGAC |
| | CGTGCGTGTAAGGGGTGAGGCGTATGGAGCTGTGGCAGGGCGGAGGCGTATGATCTC |
| SEQ ID NO: 470 | ACTATACAAATCTAATTTAATAATCTCCAGAACATTAAGAAAGGTATTGTCGGTGACATCAT |
| | CGATAGGGCATTTCTATGTAGATGAGGTAGCACAGGGCTGCTTCTTCACCATGGAGGATTTC |
| | CCGTGCTGTAGGAGCAAGTCCAGGACTGCTGGGTGGACGTGAGAGTCCCAGCTGTGTGTTA |
| | GGGCTAGGAGGGCTCAGGGTGGTTGGGGATTGGTGGGGGTGGTTCTCAGAGCAAGTGACCA |
| | TGCGTGTAAAGGTGAGGCGTATGGAGCTGTGGTGGGGCAGAGGTATGTGGACTG |
| SEQ ID NO: 471 | GGTTCAGGCAGCGGGTTGGTCGGCTGACTGGCAGAAAGGCAGATGGGGCCTGGGAAAGGC |
| | ACTGTCGGTGACATCACGGATAGGGCGACTTCTATGTAGATGAGGCAGCGCAGGAGCTGCT |
| | GCTTCCCCACCTGCTGCTTCGCCTCGAAGGAGTTCCCGAGCCTTGGGAGCGGGCTCAGGACC |
| | GCTGGTCCGGCCGGAGAGTCCCAGCTGTGTGTCAGGGCTAGGAGGGCTGGGGGGTGCGCGG |
| | GGCAAGCGACCGTGCGTGTAAAGGGTGAGGCGTACGGGGCGGAGGTGCAGGAGCTC |
| SEQ ID NO: 472 | TACCAAAGATGATGAAAATAAGTATATGTACAAAATATTTTAGTATTTATGTGCCTGTAAAT |
| | ACAAAAGGAGCAATAAAAGTGATTTCATTTCAGAAGGTGAACATTTTGAAAGAAATAATAT |
| | TCATGTAAATTCTGAACTAAAATAGAATGAAATAAAATTCTGAAATAAGATAAAAATAGAA |
| | TGTTAGCATTATAGGAAACTATAGAGATTATTTGAGCTAATCTTCTCATTTTATGTATATGGA |
| | AGCTGAGAAGTGACATATCCATAGTCATACAGCTAATAAATAATCAGGATGGA |
| SEQ ID NO: 473 | GGGTTTGGAAGAACCCCGCGTCCACTGTAAGCTCAGGGGAGAGCGGGAGCCAGGGAGGTG |
| | AAGTGCACAGACTGGACAGAGGCGGCGGGCAGAACCGCGGGGGTGAGAGGGCGCGTGGTT |
| | GCGGGGGGGGAGCCACTGCTGAAAGGCGGCCTGCGTTGTCGTGTGGGGTGACTGTCGGTGG |
| | AATCTTTGGCAGAGAGTGGTTTGGAAGAATGGCGAAGGGGGCAGTGGGTAGGGTGGTGAC |
| | CCTGAGCGTCCGACCAGGGCGAGGACGCTGTGCTGTCCCTGCAGGGCATGCGCTCATTC |
| SEQ ID NO: 474 | GGGCGCGGTGGCTCACGCCTGTAATCCCTGCACTTTGGGAGGCCGAGGTGGGCGGATCACG |
| | AGGTCAGGAGATCAAGACCATCCTGGCTAACATGGTGAAACCCCGTCTCTACTAAAAAATA |
| | TGACAAAAATTAGCCGGGCGTGCTGTCGGGCGCCTGTAGTCTCAGCTACTCTGGAGGCTGA |
| | GGCAGGAGAATGGCGTGAACCCCGGAGGCGGAGCTTGTAGTAAGCCGAGATCTTGCCACTG |
| | CACTGCAGCCTGGGCGACAGAGCAAGACTCCGTCTCAAAAAAAAAAATTTTTTTTA |
| SEQ ID NO: 475 | ATTTGTCAGATTAGATTATAAAAGCAATATCTAACTGTATACTGCCTAAAAGAAATCCTTTT |
| | AAATATAGACAAAAATAGGTTAAAGCTAAAGGGATAGAAAAAATGTACCATGCTAATGCT |
| | AATCAAAATAAAGTTGGAATCGCTATACTAATACTAATAATGTAGATTTCAGAGCAAAGAA |
| | TATTGCCCGGGATAAAAAAGAATCATTTCATAATGATAAAGAGGTCAATTCATCAAGAAGA |
| | CATAATAACTCTAAACACTTATGTACCCAATAACAGAGATTCAAAGTACGTGAAGC |
| SEQ ID NO: 476 | AATCTTACCACATTCTCATAGTAAACGCACAGGAAAGATCCCCTGTGGCTCTAGCAGGATG |
| | GAGGGAAGAGGGGAGACTAATCATATAATCCAGAACATTCTCCAGAAAAAGGCCTAGTCTC |
| | CAGGGAAAAAGACTTCCAGAGACTTATCCTATCCATGACAACTCCAGTCCCATTCACTCTTG |
| | CTAGCTCATGTAAGGGTGGAAAAAAGCTAAGAGACATTTGTGAAAGTCATGGTCCAGGGAC |
| | ATCATTATACAAAAGACTGAAATTTAATTATAAGATTATAGAAATTCTTCTTCCC |
| SEQ ID NO: 477 | GTGTCTCTTATTCCTCCATTAGTACAACTAATCTAGAGTTGACTATATATTGAAATACTTTGT |
| | ACTACTTAAAACTACCAGTGCTCAACTTCTGTGCCAAAATTTCTGCTATCTGGAGCTAAGTT |
| | GGGCCTAACTGTAGCCGTTCTCATGGCTGAAACTAAATTGTCATCCTTTGCTTAAATCTCTGT |
| | GGCTCCGGTGTATCCACATATGATGGAAAAAGATTTTGCCCTGAATTAGTATTTATTTCCTA |
| | AAAGAAGCCGTAAAAGGAAGTAATGATCAAGTCTTTTTAAAATGGAATAT |
| SEQ ID NO: 478 | ATGGCCTCTACTTCGCCCCCTAGTGGTAGCACCAAAGGCACCCGGTGAATAACAAGGTGTG |
| | GAATCTCAAGGTGATGACTCAACATCTCATTTGCATACCCATAGTACCCTGCACATAGTAAA |
| | TTATTTAAAGCTTAAAAGAATATTTCTTTTGACTCAACATTTCTAACTATGGGAAGATTAAA |
| | GAATTCTTTTTGTGCAAACTGTAGGCAGTAATTCTTTTTGTGCGAACTGTAGGCACCATCGG |
| | CGTACTAGGAGTTGCGGTTACTGCAACAATGAGTTGAACTAATTTGTAGCATT |
| SEQ ID NO: 479 | GCAGTATGTAGCATTTGATTGGCTCTTTTCACAGAAATATGCATTTAAGGTTTCTCCATGTCT |
| | TTTTATGGCTTGATAGCTCATTTATTTTTAGCACTGAATAATATTCCATTGTGTGGATGTACA |
| | ACAGTTTATTCATTCACCTACTAAAGGGCACTTGGCTGCTTCTAAGTTTTGGCAATGATGAA |
| | TAAAGCTGCTATAAACATCCATGTGTAGGTTTTTGTGTAGATAGGAGTTTTCAGCTCATTTA |
| | GGTAAATACCAAGGAGTATAACCGCTTGATTGGATGGTAAGAATATGTTT |
| SEQ ID NO: 480 | CATCCTCCTGTCACCTACGAAAGTTCTATCTTACCACCTTTGAATTACAGTTTCACAAACAA |
| | CTACAGTTTTCTCCAAAAGTATTCTGATAATTGAAATGTTCTGTCTTATTAAAATAGCATGA |
| | AGCATGTTCTTGTAAGTTTTGGAGACTGAAAAACAGAATCAGTTATCTGTCTTCAGCAGCAA |
| | AATGTCAAATAAATTAAATTGATAAACATCATTGACTTTTACAAAGCCCACCTGTACAATGC |
| | TGTGTAATGTCTGGAACTCCAGTGATATTCTTTCCTTTAAAAGTTGGAGCCT |
| SEQ ID NO: 481 | AAACAATTCTTTCTTCCACCAATAGATATTTCCCCTTGAGGCCAGTAACCTGATTATGTATTC |
| | CTTTTGGACCCCATAATAAGCAGGACCTACTTCACCAGTTCAGCTCAGTATATGTCTCATCT |
| | CCATGGGGCACTCCCCAGTGGGCAATTTGGTCTCACAAGTGAGTTCTTGGCCATCCCCAACA |
| | GGAGATGAATTCTCAGGGGAGCTCAGCGGGATGCCATCGAATCTTTGTCTGATCAATTTCCA |
| | TTGTTCTGATTTTACCCACCTCAACAGCCTTCACATCCTGAGCAAGCTGGC |
| SEQ ID NO: 482 | CAGAACAGCGACACGTCTGTTTTATGTTTTATTCAGATCACTGTGACTACACGTTGGGAACA |
| | TAGTTACAGAGGCAAAGACCAGGAAGGATGTCATTGCAATCATCTAGATGACAAATAAAGG |
| | CAGCTTGGACCAGGCCAGTAGCCATGGGAGGAGGAGCACTGGAGATAGATGATATAGATCT |
| | AGGTGTAGATATAGGTAGATATCGATGATAGATATCGATGATATAGATAGATATAGATGAT |
| | AGAGATAAATCTATATGTGGGTGTATTTTTAAAATTGTGATAAAGTCCATATAAC |
| SEQ ID NO: 483 | ACAGTGCATTAATAATTAATTAGTGCTTAATCAGGAGCTCTACATAGCAGTTCATTACCCAA |
| | GGACACTCCCCATTATAACTGTAGCAAATGGGTCTGGGCAGGCAGCCCTGCCAGCCTCTTTT |
| | GAGGCTCACCAGTGACTTTGAGGCTCCCCTTCCAGGGCTGAGGTCACTAACCTCCCCTAGAC |
| | CTGGCGACCAGTAGCTGGTGTAAGAGGTCCCCAAGAACAGGGGTGATCTGACTCACCCTGG |
| | AGAAATTTAAGACACGCTGGGAAGGCAGAGCCCTTGCTTAAAAATAACTCCTC |
| SEQ ID NO: 484 | CTGACCAGGCGCAGTAGCTCATGCCTGTAATCTCGGCACCTTGGGAGGCCGAGGCAGGCGG |
| | ATCACATGAGGTCAGGAGTTCGAGACCAGCCTGGCCAATGTGGTGAAACCCCGTCTCTACT |
| | AAAAATACAAAATTAGCTGGGCAATGGTGATGTGCACCTGTAGTCCCAGCTACTCGGGAGG |
| | CTGAAGCAGGAGAATCGCTTGAGCCCAAGAGGTGGAGGTTGCAGTGAGCCGAGATTGCGCC |
| | ACTGCACTCCAGCCTGGGCAACAGAGCAAGACTGTCTCAAAAAAAAAAGTAAAAGG |
| SEQ ID NO: 485 | CACCCTCTTCCACTGAGTGGCCCTTTCAACCCTTACAAAGCCGGAGAGCTCAAGTTCTGGGC |
| | CCTGTGGCCTTGGTGAGCAACACCCTGGACCGATCAGAACGACCCAGTGAGTTGGGAAAAC |
| | GCTCCTTTTACCGATAAACTTGAAGCAACTCATGACTGTGGCTCTGGCACCACCTCAGCGGA |
| | GGCGGAAGTGCCATAGAACTTTTAAAAAATATATTTACCAAGAATTAAAACCAGGTGAAAT |
| | AGTCTTGTATTTGGTAGTTTAAGGGAAAGCAATTGGCTGGATTAAAATGTATTC |
| SEQ ID NO: 486 | TCAATGAACCACATAAAATTGTGATACATAACAAATATTACTCAAAAAAAAGGCCAAAATA |
| | GTATGATGTGGGATTTAAAAAATGTATTCTAATTTTTAGGAGTATAACTAGCTTAATCCAAG |
| | TAATTAATACAACCACTAATAAACGAATTTCTAAGCCAAGACACTGCTATCCAAAAAAGTA |
| | GATAAATGTACTATACACTTTAGCAAAGTACACATTTGTGTTAAGGCTCCCATCTTCTACAT |
| | TCTAAAAAAGAAAAAAAATTATTCACGAGGAGAATTTTAAAAGTGGAGAGTTCA |
| SEQ ID NO: 487 | CAATTATTTGGACAATGATATAGAAATGATCCTTATCAAATTTCTCAGTTGATGAGCTAGGA |
| | GAAACAATGAACATGTTAGATAACTGAATCAAGATCCAAAAACACTTTGACAAACTAAATA |
| | TAGCAGACTGCTGAGGAAATGAGTGGTGATACACTGGGTGCTTTTTTTGTTCAGTAAGAGCT |
| | GGAGGCAAAAGGTCACAGGTCGATAGATGCCGTCATGAGGAAGGGTCCTATGGATTACCAG |
| | TAGCTTTGGTGATGGCCAGATCAAATGGAATTGCCTGAAGCATTAAAAAAAAAA |
| SEQ ID NO: 488 | TCTTCTTTCTACTTTCCATTCACGTGGGCATCTTCCTTCCCAGGGTTTCGAAAGCCCCTCACG |
| | TCCTCCCTGTCATTTCATAATCCTGCTCACAGAGCACTTTTTCCATCTTCCTCAAACAGTCCA |
| | ATCTTGGCCCGGGAGAAGGGTTCAGGGACACAGGCTTCCTGTGGGCAGAAATTTTATTCTA |
| | AAATTTCTACAATAAACATGTTTATTTTTACAATCACAATAAATTTTAAAACTTTAAACAAG |
| | GAAATGTGTAAAGAAAAGGGAAAATGGGAGGGGTACACAAAGTTTATGCTC |
| SEQ ID NO: 489 | AGCTTTCAAACCAGCTTCCCCAGGGCGCTGTGCAGGGCCCGGCCCCTTGGTGGCCACGCCTC |
| | CCGGGCGCAGAGCGGGTGGGACATGCAAATGAACGGCCCTCGCGACCAAGGAAAAGGGGC |
| | GACAAAGCTCGAAGTCACTAAGAGTCAAGGAGCGGACAAAATGTCTCAAAGGGCCTATGTT |
| | TTCAATATAATATTTACATCAGAAAGCAGGTGAGATGTTTACCGAAGGTGAGGTTTCTCACC |
| | GTGACCTTAAGGTGGATGAAAGAAGGGAGGACGTGGGAGGCCCCGGGTAACTGGT |
| SEQ ID NO: 490 | GTTGCAAGGATTTAATATAACTTATGTAAAGTGGGCAGAAGTGCTCCGCAGGCACAGAGCA |
| | GGTGCTCAATAAATGCCAGGACCAAAATACCACGAAACTGTAATTTTTATAAGGAAAAGGA |
| | TCTTTTCTTCAGTGCTCAACGAGGAAATATTATGGGGCCGTGCGCAATAGCTGACGCCTGTA |
| | ATCCCAACGCTTTGGAAAGACTAAGCGGGAGGATCGCTTAAGCTCAGGAGTTCGAGGCTAG |
| | CCCGGGGAACATAGCGAGATCCCTTCTCTACAAAAAAAATTTTTTTTAATTAGCT |
| SEQ ID NO: 491 | CCAGTGTGTTAAGAACTGCAAGGACCACTGGAAATACAAACACAGTTAAGACAGTAACGCA |
| | CTTTGAATTAAAAGGCAAGGAGATGTTATTACAAATGAACATCTAAATTATTGATATCTCTA |
| | TAAAATTGAGGTTGTAGTACGATGTTCAGTCTTGGCCTGTGTACGTTTTGGACCAGATAATT |
| | GGTTGTAGGGTAGAAGAAAGAGCGTCCTGTGCATTACCGGGTGTTTAGCAGCAGGCCGGAC |
| | TCTACACACTTAATGTTAGTGGCCCCCTGATTTGCGACAAACAAAAATGCCTCT |
| SEQ ID NO: 492 | TTCAGATTTTGGAATACTTGCATTATGCTTACCAGTTGAGGGTCTCAAATTTGAAAATCCAA |
| | AGTCTGAAATGCTCCAGTGAGCATTTCCTTTAAGCATCAGGTGGGAGCTCAAAAAGTTTCAG |
| | ATTTTGCAGCATTTCAGATTTTCAGATTTGGTCTGATCGACCTGTACTAATAGCAGTCAAAA |
| | TGAAATGTAAGGCAAAAAACATAACTAAACATAAAAAGGGCCATTTCACAAAATGTTCATT |
| | TCCCCAGCAAGATAATAATTTTACATTTCTATGCATTAACATATTATAGAAAG |
| SEQ ID NO: 493 | GTCACTAACCAATGCTTTTACGAATACAGTAAAATAAATTACTAGAAAAATGAAGTATTAA |
| | AAAAGATCAAGAAAGTAAGATCAATGTTAATTTTCACTCTAAGAATCACTAGATTTTATCAA |
| | ATAGCTATGAAAGTTTCTAAACACTCTCCATTTCCATACTTAACACAGTCTGGAAGCAAAAG |
| | TTTCAGAGGATGATACAAGGTCACAGACTACATTTTAAGTAGATTTGGTCTAAAAGACCACT |
| | TCTAATTTTGAGGACACAGACTTTTAGTACAGCTCTTTAAGAATAGTTATTTG |
| SEQ ID NO: 494 | AAAGAAGTTTAATTGACTCACAGTTCCACATGGCTGGGGAGGCCTCACAATCATGATGGAA |
| | GACAAAGGAGGAGCAAAGTCACGTTTTACATGGTGGCAGGCAAGGGAGCTTGTGTAGGAA |
| | CTCCCTTTTATAAAACCATAAAATCTCATGAGACTTACTCACTATCACAAGAACAGCATGGG |
| | AAAGACCCACCCCCATGATTCAGTTACCTCCCACTGGGTCCCTCTCACAACACATGGGAATT |
| | ATGGGAGCTACAATTCAAGATGAGATTTGGGTGCAGACACAGCCAAATCATATCA |
| SEQ ID NO: 495 | TTGACATGATTCCCAGAGTTGTCCCTTGACTCCCAAAGGGGTTCAGAAAATATGGGAGCTG |
| | GAAGGATTGAGCTGACCACTTAGGTTTATGAGTGTGAATACACAAAATAGATGTTTGGGTC |
| | AGGCCTCAGGAATAAGATACTGAGACTGATTATGTTCAGTGAGAAAGATGTTTCCTTGGGA |
| | GCATTACATCAGGTCAGAGCAGTATCAGGGAAAGTTTGAGAGCACTGGAGAGCTGTAGGGA |
| | GCTGAGGTGTCAGCCTCCACCTCAACTGAGAAATAGGAGAGGTGTGGCGTAAGTAG |
| SEQ ID NO: 496 | GCACATGTATCCCGGAACTTAAAGTATATTAATAATAAAAAAAGAGATTAAGTAAAAAAAA |
| | AAAAAAAAAAAGAAAAGAAAAGGAGAGGTAGGTGAGAGAGAGAGAGAGGAAAGAAAGCT |
| | AGTATTTGTAGTTATCCTATTCTAAAAAACTACTATTCAACTAAGACAACTAAGAAAAATAT |
| | ATTCCAATAAAAAATTTTAAAATTACATTATGAGGGTGAACATGACTATTTAAACAATCTGT |
| | ACTTTAATTAATTAATTAAGAACCCAGATTAGTAAAAAAAATTTTTAAATCCAGAT |
| SEQ ID NO: 497 | CCCACAGCAGTAAAGAATAATTACGCAGTTATTCTTCTGGTTATGTTTTAATTTCAAAAAGT |
| | TAAGTGTGATTTTCCTTTTTGCTGGGATTTCTGTCTTGAGCAAATAATTATTCTTATGAAAGT |
| | ATCAATTGCAGTTACTGGTTAAAAATGTAAGACCTAGGAAATTTAAGTGTTGTTTCTATTTT |
| | AAGGTATATACATAATTTATAACCATTTACTTCTAGAGAAAATCCTGAATGGTTAGTAATAT |
| | CAAAACATTTTCAACAAGAAAACTAAAATGAAAAGAAAGTTTAAAAATTAC |
| SEQ ID NO: 498 | AGTATGTTCTGATGAACATAATCTCTAGAAAGAATACTACAGATCTTCAAGCATAAGATAG |
| | AACTGTATGTATTGACCTGGAAAGCCATGATAAATATGAGGAAACAAATCTGAAAGAATAA |
| | ATTCCAAATTGTTAGCAGTGTTTACTAGGAGGAGATTTGGGAGCACTCTGCCTATAGTCTCC |
| | AGAAAACCAGCAAACAAGTTCCTGCCAAAAGCTATATAATTTCTCGAAGTTTAATTAGGTTT |
| | TAATTAAATATACTTAAATCTTTGTAATCATTTCTCTACCTGAAGAATTACTGT |
| SEQ ID NO: 499 | CAGCACGCAGCCAGGGCTCAAACCCCTGCCCTCCACTGCCTCCTTCACAGGTGTTCCTTTGG |
| | GAACCTCCTTGATTCACCGCTCAGTTTACATGGCCAGCTTTATTTGTCCCTGGATGTCACCTG |
| | ACACCCGTCCATGAACACTTTTCATTTGCAGTCAGCATGCGTGGCCAGCACATTCCAGCCCC |
| | TCCTACCCTGTCTCCTATTTTGTGCTATTTCCCAAAGGCCTTCTGTTTCCTGTGGTGCAGAGG |
| | CCAGCAGCAGCCCGGGAAAACGCACCTGCAGGTGACTGTAAAGAGTTCAG |
| SEQ ID NO: 500 | CCCAGCACTTTTTGGGTATCTCTCCTATGTCATAGGAGAGACATTACATCTATGTAATAGAT |
| | GTAATGATGTTGTACAAGGCTGAGCAACCTCAGCCTTGCTCTAAAATTATTTACATCATAGT |
| | TTACCATTCTTTGAGGGTGGCACTTTGCATTTCATAGAATAATTGAACATTTAGAGAATTAA |
| | TTGAATGAATGCATGGATGCAGAGTTGGATGGAGGAATGGATACATGATGGTAGATGAATG |
| | AATGGATGGATGAAGGGACGATTGGTCCAGGAGGAAATAGAAAAATAATTGCA |
| SEQ ID NO: 501 | CAAAGACACCCCAGGGGACTCTAGCTCCTGTGGTTGAATCACCCCTGCTGAGGCCCCAAAT |
| | ATCATGGAACACTGAGTCTGAATAACCCACAGAATCCATGAGCAAAATAAAATGATTATTT |
| | CACAGCCCCAAGTTTTGGAGTCATTTGTTACAGAGCTAGAGTAACTGGGACATCATCTCTCA |
| | GTAAACAGAATCACGAATCTGAATGAGAACCCCAAGTGAAAAACCAGCCAGGGGTTTAAA |
| | CACACTGGGAACAATGTGGTCCCTGAAGCAGAAGATGAAGTTAAAATCCCAGCTCT |
| SEQ ID NO: 502 | TAGCTTGATTTGAAATTGGAACAGGCTGAAAATAAGAAGAAAAGCCAAAATATATGTCTCT |
| | GGATTTTTTTTATCTTGTTCAATTAATTTATTTCAAATGAAGAAAGCCAGTTTCCATCCAGTT |
| | ACAATCATGAATTCCTCAGAGTTTATTGTTAGGTCAATATTTAGAAACAGCATTACATTTTC |
| | TCACAGAAACAATGAACAATAATGATTATGTTTGCTTCCAGGCTAGCTCACAGAAGCCTAT |
| | ATTCCTCTAATTGTAATGAAAACACATCTTTGTATTGAAAATAGTAGAAAATT |
| SEQ ID NO: 503 | GCAAGCTTCCAGGGCCTGCCAAGTGCCTTTTGCAGGGTCAGTTCTCCTGAGGGCTGGTAGGG |
| | TGGGGCTGAGTGGATAGAGCTGAGACTGCAAGAGAGAAGACAGGAAGTGCTGGGCACAGG |
| | CTGTGGTCAGAGGCCGGCGATCAGGCAAGGGACTCTGAGGTGTCCACAAATTCTCAGTTTG |
| | AGCCTGGCCCCAAAGGTTGTGATGAAGGCACATATTTGGTCAAGTTAGGAGGATAAAATCT |
| | ATTTTTGTTTTGCAGTTTGCATTTTCAGCTTGATTTCTAGCTGAAATATCTAGACA |
| SEQ ID NO: 504 | TCACTCTGGGCAAGTGGACAATGACACACACCTCCTGGGTTGTTCTGCAGGGGTAAAATGA |
| | AAAGATGCCTGTGACACAGGCATTATTTTTCCACTGTATACAGACCAGGGGATTATCACATT |
| | GTGGTGAGATTTCTTTTTATTTTCTTTTAATCCATGACTGAAAAGTGGTATGGAATTAAGAA |
| | GGAAAGGTAAAAGCAAAAAACATAAAATTTAAAAAATAATAGTCGTCATTATTAACGAGG |
| | ACTTCTAAAGCAAGTTTCTAGCCTTTTTCCTTTTTCTAGATCAGAATTTGCTCCT |
| SEQ ID NO: 505 | TTGAGAAAATCTTAACCTATTTCATGGAGACATACTTTCCAGAATTAACAAGATGACCAATT |
| | AAAAACAAATAGCCCTCCTTTAGTCCATGGTTGCCTTAAACAATATATTATGTATTAATTTC |
| | TTTCTAATGACTGTGCATAGCTTATTGTGTGGTATATGGGCTTTGTTATATTTATTACTGTCA |
| | TTATTTTCCTTATTTTCCTATCAAAACTAGCCTTTCAGTGAATATCTTTCTAACATACATCAC |
| | TTTATACTAGTCAGATAAATATAAAACTCAGGTGAAGAGTGGACAGTATG |
| SEQ ID NO: 506 | TTTTGGTTATTAGAATATTTTACCATATTCTTACATAAAGTAAGTAGAGAAAAGGAAATGTT |
| | ATTAAGAAAAACCATAAGAAAGATAATATATATATATATATTTATTATTCACTAAGTGGAA |
| | GTTGATCATCATGAGGATCTTCATCCTCATTGTCTTCACATTGAGTAGGCTGAGGAGGAGGA |
| | AGAAGAGCAGGGGTTAGTCTTATTGTCTCAGGGGTCATGGTTACCCTGCAAGTTTCTTCAAA |
| | CTGTTGTAAATCTCCAAAAAAAATTGGTATATTTATTTTAAAAAATCCATGCA |
| SEQ ID NO: 507 | TGCACTCCAGCCAGGGTGATAGAGCGAGACTCAGTCTCAATAAATAAATAAATAAATAAAT |
| | AAATAAATAAATAAATAAATGGTTTCAATTAAGTAGCTATAATGAATATTATTCTTAAACCA |
| | TGCCATTCTGGAAAAAGATTGAAACAATGGAACAGGGTCATTCAGGAAGCTTCTGTGATAC |
| | CCCTCTATAGACTCATAGATCAAAAAAAAAAAAAAAAAAACCACAAGACCCTTTTCCTTTT |
| | CTGAATAAAGGCCACTCAACGCTGGTATTCTGGGAATTGTCCAGATGAGGATGCA |
| SEQ ID NO: 508 | CTCTAGCTGGGAGGCAGCCATAAGTGGTCTACCTTGAATCCTGCTCCAGTGCCAACAGGCTG |
| | CTGGGCTTTTCTGGAATAAATTGGAGATCCCCTCCCCACCTGATCATGGGGTGGCATTAGGG |
| | TCCTGGAGAAGGGCTATAGAGAAGCCCAGCCTGGTCCCAGGTCCCACACAGAGCTTCTCTG |
| | ACCCAGCACCCATGATTGGGAAGGTCTCCATGTTCTGAACTGGGGGTCCATATTCTGAAAG |
| | GTGGGCATGCGCGGCATCACCATTGCTGGGGCTGCCGTCAAAACACATAGTGCT |
| SEQ ID NO: 509 | GCGTGTGTCCCCCCGTGCATGCGGGGAAGGAGCAGTGGGGGAAGGCTGAGTTGGGCTTTCA |
| | ATTAAAAAAAATGTGCATACACTTAGTTTTTTGATGCAAAATTGCCAAAGGCGTGTACCGTG |
| | AAAACCTACCTCGACACCTGCCCCCTGCCTCCTGTTCCCTTTCCGGAAGCGCCTGCCTTACA |
| | CCGGTGTGTTCCTCTAGAGATGGCCAGGACCTGGGTGAGGCAGCACACACTCACAGGACCT |
| | TCCCAACACTCATTATGAAACATATCACATGGAAAACTGCAAGAATTACAGGCA |
| SEQ ID NO: 510 | GCCAGGTGCAGTGGCTCACACCTGTAATCCCAGCACTTTGGGAGGCAAAATGGGTGGATTA |
| | CCTGAGGTCAGGAGTTTGAGACCAGCCTGGCCAACGTGGCGAAACCCCATCTCTACTAAAA |
| | AAACAGAAATTAGTTGGATGTGGTGGCACACACCTGTAATCCCAGCTACTTGGGAGGCTGA |
| | GGCACGAGAATCACTTGAACCTGGGAGACAGAGGTTGCAGTGAGCCAAGACTGAGCCACT |
| | GCACTCCAGCCTGGCTGATAGAGTGAGACTCTGTCTCATAAAAAAGAAAAACAATTA |
| SEQ ID NO: 511 | ATTCACCTGCCTCAGCTTCCCGAGTAACTGGAATTACAGGCATGTGCCAATACGCCCAGCTA |
| | ATTTTGTATTTTTAGTAGAGGGGGGTAATTAGCTTATTTTTTGTATATAATGAAGTGTCTGCA |
| | GACAGCCACACCCTGGGCTGGTATAATGAGGGGTTTTTTGTAGTCATTAGAGACCCAGACTC |
| | CTTATATCTTTGCCTCCACCACGCTAGTATGTGTTCTTGCCCTCATGGTCATATCTCACCTTC |
| | CTTCCTGGCTAGATGAGGAGAAAGACTGGAGAGTGAGAAAGACATTGACC |
| SEQ ID NO: 512 | TCCTTTAATTTATATTAACTTTCCAACTACCTTAATGTTTGCTAGTCAAGTCCATGCACATCT |
| | TACCCTCGAATGCTCTTACATGTGTGTAGACCTAACTGTCCTATTAGATCCCCTGTCTATTAG |
| | ATACCCAGAGGCATGACCCAGCCAGGTCACTCAAGAGTGGCTCAGCAACTCAGCAGACAGG |
| | ATGTGGTCAAGGGGATGGTCAGGTCCCTGGTTCCACCTCTGTGGTCAGCAACAAGGAAGGT |
| | GTCTGATCAGAGAGAAAGAGTCAGAAAAGCAAGAAGCAAATGTATTATAATA |
| SEQ ID NO: 513 | CTATTCAACACAGTATTGGAAGTTCTGGCCAGGGAAATCAGGCAAGAAAAAGAAATGAAGT |
| | GTATTCAAGTAGGAAGAGAGGGAGTCAAATTGTCTCTGTTTGCAGATGACATGATTGTATAT |
| | TTAGAAAACCCCATTGTCTCAGCCCAAAATCTTGTAAGCTGATAAGGAACTTCAGCGAAGT |
| | CTCAGGATACAAAACCAATGTGCAAAAGTCACAAGCAATTCTATACACCAGATTCCTCTATT |
| | TCAAAGTCTTGAAATAAGTGCCCTAGAAGCAGACTGATCAAAGAGACACAGCCC |
| SEQ ID NO: 514 | TGAACCTGGGTTTTGAGCCCTCTCTTGTAAAATGGGCACAGTAATATTACCTACCTCAGGGA |
| | GTTGTGAGGATTAAACATGAAGTGCTAAGCATAGTGCCTGGTACAAAGACAGTACTCAATA |
| | AGTGCTACCTAAAACTAGTATTCATAGCAATACTGTTAGGATAAAGAATTATCATATATGAG |
| | ATAGTTCCAAATTTTTGTTTTTTTAAAAAAAAAAGAGTTTTATAAGTTCAAGATAATATTTTC |
| | TTACTTCAAAGAAACAATCTCACAACGAGGGAATGGTAAGAATCAGGAGAGA |
| SEQ ID NO: 515 | AGCGAAACCTCATATCTACTAAAAATTAGCAGGGCGTGGTGGCATGTGCCTGAAATCCCAG |
| | CTACTCAGGAGGCAGAGGCAGGAGAATCGCTGGAACCTGAGAGGCAGAGGTTGCAGTGAG |
| | CTGAGATCACACCAATGCACTATAGCCTGGGCGACCGGGTGAGACTATCTCCAATAAATAA |
| | ATGAATTAATTAATTAAAATAATTTTAAATAAAGAAGACAGCATTTTTAACCTGAATTGAGG |
| | AAATTAAACAGATATCAGGAAGAAATGTAAGACGAAACAGAAAATGCCTGCAGTTT |
| SEQ ID NO: 516 | AAAGGAGGCCATTTAAAAATATGAGTGGGAAAAAGGAACAAGATATATACATAAATCATT |
| | CTGGTACAGAATAAAAAATAGTGATGGAAGAGAAGTAACTCATCAGTTTTGGAATCATTAG |
| | TGAGCGGATCATCAGTGTTCTTGGTAGAGAATATTTTCAGACTAAGAGTATCAGGGAAGAC |
| | TGTAAGAAGGAGATGGATCTAGAGGAAAATATAAGATTTGAATTTGTAGATACTTGTGGTA |
| | GGTAGTGGTTTGATGAGGTCAAGATATTCCAGCAATGACTATGTAAGCAAAGGTAAG |
| SEQ ID NO: 517 | GTGCAGTGACATAATCTCAGCTCACAGGAACCTCCGCCTCCCAGGTTCAAATGATTCTCCTG |
| | CCTCAGCCTCCCAAGTAGCTGGAATTACGGGCGTCTGACACCACACTCAGGTAATTTTTGTA |
| | TGTTTAGTAGAGACGGGGTTTTGCCACATTGGCTAGGCTGGCCTTGAACTCCTGGCCTCAAG |
| | TGATCTGCCCGCCTGAACCTCCCAAAGTGCTGAGATTACAGGTGTGAGCCACCGTGCCCGG |
| | CCAGAAACAGTTGTGTTTTTTTTTTTTTTTTTTTTCTTTTTTAAAGAAGAACA |
| SEQ ID NO: 518 | TTCATAGAACATTTTCCAAAATGGATTATGTTTTAAGTCACAAGAAACACTCAATAAGTTTA |
| | AAAGATATTTTAAAAGATTATAGAAGCTGACAACAATGAAAGAAAATATGAGTGAATAGA |
| | ATTATCCTAAATACCTCCTGAGTCAAAGAGGAAATCAAAACTAGAACCACCAGCTATTTGG |
| | AAAATACTGAGCAGAAGAACATTGTCCATGTAAATTAGAATGTGCAGCCAACGCTGCATTC |
| | AAAAGCAAATTAAGAACATTAAAGGTTTTTATTATTAAAAGACATTAAAATGAACT |
| SEQ ID NO: 519 | AATCCCAGCACTTTGGGAGGCCGAGGCAGGCGGATCACCTGAGGTCAGGAGTTGGAGACCA |
| | GCCTGGCCAACATGGTGAAACCCTGTCTTTACTAAAAATACAAAAATTAGCTGGGTGTGGT |
| | GGCACTAGCCTGTAGTCCCAGCTACTCAGGAGGCCAGGAGGCTGAGGCAGGAGATTTGCTT |
| | GAACCCTGGAGGAGGAGGCTACAGTGAGCCGAGATCACACCACTGCACTCCAGCCTGGGCG |
| | ACAGAGACAGACTCCATCTCAAAAAAAAAAAAAAGAAAGAAAGAAACAAACGGTGT |
| SEQ ID NO: 520 | CCTGAGTTTCCTCATCTTGTTGCCAGAGGCCAGGAGGCCCTGCGGGATTGGAGTAGAGGAG |
| | GCTACTAATTTGGTGACTGGCATAGGAGGATGGATGGGAGGCAGCACAGGAAATTAGACA |
| | GCCCTGTACATTGCTGCTGCGATAGACCATCAGCCATGTAACCCAAGGCCAATCCAGTGGG |
| | ACTGGGCCCCGGATGGCACCAATAAAAAAATCCTAAACGCACATGACTGTTTGCTGACAAT |
| | TACAATTTCATGAGGGTAAAATCCATGTGTGGTTACCACTATAAAAACTCACACTCT |
| SEQ ID NO: 521 | CAGAACTTAAAGTTAAAAAAAAAATCCTAGTGCATGTGTATATTTAAAAGCCAGTTTGATTT |
| | TTGTTTTCTGTGTTTTATGGACAAAAAGACTAACACAATCCCATTTTACACGTGAAACCTCTT |
| | AAGCTTACAATGGGAAATAATTTGCCCAAGGTTACCTAACTAGTTAGTTGTGGAACAGGCTT |
| | AGAATCATACTTCAACTTTGTGTCCTTAACCACACCATTCTATTCAGGCACTGTGATAGAAT |
| | TCTCTCTCAGTACCCACGACTGAAGAGTAAGGTAGCAAAAGTGTAGATTGG |
| SEQ ID NO: 522 | TTTATTTATGTAGTCATTCTTTTAATGTGTAATCTTGCTCTAGTAGTTAAAACTCCAGTTTTCC |
| | CCCTTCTTATCCAAGAGAATTAGAGTATCTTTCAAAAAGTATTTACATAGATGTTTGATATC |
| | ATTCGTGATGTTTTTTATATTAATGAAGCAAATTCTTCAGTTTTGCCTGAAGTTCTGCCTTGT |
| | CTCCTGGGCACAGAATTTATTCTTTTGAGAATTTCCTCAATTAATATGAGAATGGTATCTGA |
| | TGTTTTGTCTCCAAGATAGCCTATACAACCAGGGAATAGGTTAATACTC |
| SEQ ID NO: 523 | AACCATCATGTCCTCAGAGTAATTAGATAACCTTTTGCACCCAAAGTTCCACAAGTGGACAT |
| | ATATGAAAACAGAATTTAGAAATCAAGTAATTAAAATATGGTGAATTATAAATAAAATAGA |
| | ATGTTTCTTCAATTACTAAAAGATTAAATTTATGTAATATAATAGAAAATATAACAAAAAGT |
| | CAAAATACAAAAAATAGGAAAACAAAAAATTTTTAAAGGAGAGATCAAGCCAAGTATTCA |
| | ACAGGTGTCTCATAATGTTTCCAAAAGAGAAGAAATAAAATAAAGAAATTTGAAG |
| SEQ ID NO: 524 | TTCGTGAATGGGGCTCAGGAAGCTATTTTTAACAGCTATCCCATGTAAGTTGAAATACATTT |
| | GTTCTTTGGGCTAATATCCAAATTTTTTAACCTTAATGATAATAATCAATAACTTGTTTCTAG |
| | AATACTTTTTGAAGTCTTTATGCACCACCCCCTAAACATATACATGCTTTAATGATATGAAA |
| | CCATTCTCTCTAAATACCAAATTTTCCAGACTTCACTGATTTTCTTAATCTTTTATTTCCAGTT |
| | AAAGTATACTGCCTGTTAATTGCTGCCTATCCCGCTCATGTATGGTTTG |
| SEQ ID NO: 525 | GTTTTTTAATATATAACAAATATAAATATGTCTGGTGCAGTGGCTCATGCTTGTAATCCTAG |
| | CACTTTGGGAGGCCAAGGCAGAAGAATTGCTTGAACTCATGAGTTCGAGACCAGACTGAGC |
| | AACATGAAAAAAAACCCATTTCTACAAAAAATAGAAAAATTGACTGCGCTTGGTGCAGTGT |
| | GCATGTAGTCCCAGCTACTTGGGAGGCTGAGGTGGGAGGATCACCTGAGCCCAGAGGTTGA |
| | GGCTGCAGTGAGCTGTGATTGTGCCACTGCACTCCCAGTGACAGAGTGAGACTCT |
| SEQ ID NO: 526 | TTTCTGCAAGTCATTTTATCTTTACCTGCTATTTCTCTCCTTTACTGAGGCTTAGCGTTTTGAA |
| | ATAAAACCAGACAGTTTTCTAGGCAAGTTCAATGTCCATCCTTACAACAGACTTCACCTTGA |
| | AGAGGAAAGTACAGACCTGGCTAATATGAGAGGAGGGAAAGGGAAAAATAAATGAAGATA |
| | AAAGTTAAATATTTTAAAATATTTTTGTTCTCATTTTTTTTTCTTTTTGCCTTAAATACTTGGA |
| | AGCCAAGATTCGAATTTCATGCTCAGTACCCACAGAGTAAGAATATTTTC |
| SEQ ID NO: 527 | TGAAGTTCAATAAAATTAGGTATGTCTATAGTAAAATAACTAGGAAGTGAGTTTTGAGTATT |
| | TATTATTGAGCTTTATTTAACAGATTTTAATATAATTGTCAGTTTCTATAATTTTTAATAATG |
| | GCTGTGTTTAACAATCAGCCTGCAAAATTCCTACAATTTTTAAATTGACCCTTGTAAGCTGTT |
| | ACAAGCCAGTTCTATCACACTACTGCCTATACTCTTAATTGTGGAAGTGACTTAGGGACTAG |
| | TCAATATGAGTTGAGGTGGTTCTGCTAGCTAATAATTTAAAAAATAGACA |
| SEQ ID NO: 528 | CTCTTTAATTAGATCACACCAGTTTTTGTTTTTGTTGCAATTGTTTTAGGGGACTTATTCATA |
| | AAATTTTGCCAAATTCATGTCCAGAATCATATTTCCTAGGTGTTTCTCAAGTATTTTCATAGT |
| | TTTAGGGCTTACATTAAAATCTTTAGTCTATATTCAGTTAACTTTTCTATATGGAAAAATTTA |
| | GAGGTCCAGTTTTATTTTTCTGCATATGACTAGCTGATTATCTCAGCACCATTTTTTGGATCT |
| | GTGTATGAATCTACAATTATCTTAACTCTTGATTAAAAAAGAAAACTC |
| SEQ ID NO: 529 | GTGAAACATGTAGTGTGTGGTTGCACGGCAGCCCGAGATGTCAGGTGAGAGAAAATTTAAT |
| | TATAACAGATGGCATTAACTATATAAAATTCAGGGGCTCTAGTTTATGTATGAGTAAGCATG |
| | GAAGAATTGAGTGTTTGCCTGTATTGCCCCAGAACATGACTAGACTATGTGAGATTATTGTA |
| | ATTGGTTTCTAATCTAGGGCCAGGTTAGCAGTTTAGAGGGTTATAGGTACATGACAGCTTCT |
| | CAGTAGTTAACTAATAATACTCCCTCTGAATGCTTTTCAAAATGGATGTCCCT |
| SEQ ID NO: 530 | ATTTGACTAAATTATTTTAATTTTACAATTTAATCCAGAACTAATAATTATTACAATTTAATC |
| | CAGAAAATAGATTATTTTAGCACTTGACTCATAATTACATGAAATTAAAAGAATGTATGTGT |
| | ATATATACATATATTAATGTGTAAACATATATATACACATATACATATAAACATACATATTT |
| | TTATATGCCATTTTATTGCATTTTGCAGATATTGTATTTTTTGCAAGTTGGAGGTTTATGGCA |
| | ACCCTGCATTGAACAGTTCTGCCAGTGCCGTATTGCCAAAAATATGCACT |
| SEQ ID NO: 531 | TGGTATTTAGTGGGATGAGAGGTGCAGTAGAAATTATGGACTGGCTTTTCAGCTCCTGTTCC |
| | AACCCATTTATGGAATCACTTTCTGAACTACAGCTAGAATGCCTGTTTGAACTGCAGAGGCA |
| | GAGAAGAAAGAGAAGAAAGAAAGGACAAGAGAGATGAAAGGGAAGGAAGGAAGGGAGG |
| | GAGGGAGGGAAGGAAAGAAAGATGGATGAAAATTACACTTCCCAGCCTCTTGTAGCTAAG |
| | GTCTGACTGCCCCCCATCCCCTGCTTTGTGAGTCTTAGGTGAAGAAAATGAACAGCAT |
| SEQ ID NO: 532 | ACTTAACATCATTCACTTTTTCAAAAGAATTTTAGTGTAAAATACAACATTGTATTTTCAGTA |
| | ATTTGGGGGAAATTATGATTTTTTGACAGTTCAATTGAATTGTAGTCAGTAGTATTACTGTA |
| | GATGAATCGTCTAAAGATTGGTAAGTAATTTTAATAGCAATGGAAAACGATGTTATGTAAA |
| | TACAATGCTCAATAGGTAACAACTATTATTCAATAACAGATGAAGACAGAAAACTGTTCAC |
| | ATACATTATGATATAAAGAGAAATGGAAAAATCGGTTAGGAACACGAACTTTA |
| SEQ ID NO: 533 | TTCAGATTCAAGTCTCTAGATTCTTGAGGTTGGGAAATGTTTCCGGAGCAGCCATGGTTTTG |
| | CATTCATTGGCCATTCAGGTTTTCTGCTTTGCCGTTTCCCCCCCATTCAGGTTTTCTGCTTTGC |
| | CATTTCCCCGGGGGTTTCCTTACCCTCTTGGAAGAACAACCATGCATTAAGTCCATGTTGAC |
| | TGTATTTTACCTGCTGTTTCTATGTGTTTTGCAATAAGGGCTTTTCAAAATACCCATAACTTG |
| | TGGCTAAAAATGAGGTTTGTTCCAATGTGCCTTAGAAAGATCCAGTTTC |
| SEQ ID NO: 534 | ATCTAACAATGGAGCCACAAAATACATGGAGGAAAAACTGAAAGAATTAGAGGGAGAAAT |
| | AGACAACTCAACAAGAATAATTTGAGACTTTGGTTCCAACTTTCAATAATGGATACAGCAA |
| | CTATGCAGAAGATCAGTAAGGAAATGTAAGACCTGGATAACACTATAAACCAACTGGACCT |
| | CACAGATATCTATACACACTTTAATGAACAATAATAGAATATACATTCTCTTCAAGTGCATA |
| | TGAAACATTTTCAAAAAGAGAATATACGTTAGACCATTTTTAAAAACAGCTTCAAT |
| SEQ ID NO: 535 | CAACACCTCAGATCCAAGTTATTTCCTATCCAAGAACACAGAGAGAACCAAAGGGAATCCT |
| | GTGACTGTCTCTCTGAATTTAGTTCACGTGGGGGCTGTGGGGCCAAAACATTGCTTCCTCTT |
| | AAAAAGTCTGACATAGAAACCATTTCTAGCTTCTTGATAGCCCAAGGCTTTCACAAGTGTCC |
| | CTTCTTTGTCACATATCACCAAAGCATGTCCTTCAGGTTTACTGTAAAAATATGAATGTCCA |
| | CTTTCAAATACAGGTAAGAACTCTACATGCGACTTGGAGTGAAATAATTGCTT |
| SEQ ID NO: 536 | TCTGAGGCATACATAGCCTCTGCTTGTCAAAGGATGCCTCAAGACAATAGGATCTAGAAGT |
| | GAACACAGACTCACAAACAAGAAAATGATGCAGACTAACAGGACCACCACTCCTTTATTAA |
| | CTTCAACACTAGCCACTGCAAATAATGGGCTTAAAACCAGCAGAAGACTGATCGTGAAAGG |
| | AAAATAAGCCTTAAAGGACACTTTCAAGTAAACATCAGCTACGTATATTGAAGTGGCTAAT |
| | TGCTCTACCATGTTTCAGCCTATTCAAAGGAAAAGCTATAATAGTTTCATTTTTTT |
| SEQ ID NO: 537 | CTCTACTAAAAATACAAAAAATTGGCTGGGCATGGTGGCACATGCCTGTAATCCCAGCTAC |
| | TCAGGAGGCTGAGGCAGGAGAATTGCTTGAACTTGGAAAGTGGAGGTTGCAGTGAGCTGAT |
| | GTCGCGCCGCTACATTCCAGCCTAGGCAACAAGAGCAAAACTCCATCTCAAAAATAAATAA |
| | ATAAAAAAAAAATAAAACCACTTAAACACATATTATATAAAAAGCATCTGATAATAAACAA |
| | CGGCATCTAGGATTTACACTAAATTAGTAAAAATAATTATTCTCAATTGATGAGAT |
| SEQ ID NO: 538 | GTGAAGATTGTGCCACTGCACTCAAGCCTGGGCAACAGAGCAAGACTCTGTCTCAAAAAAC |
| | AAAAATGGTAAAAATCTTTAGTTTTTAAGAGGTAAGGATGAAGAGAAGTGGGTTAAAGGAT |
| | ACAAACATACAATTAGAAGGAATACATTCAATGTTTGATAGCAGAGTAGGGTGACTATAGT |
| | AAACAAAATGTATTGTACTCAGGAGATGAACACACTAAATACCCTGACTTGATGACTTCTC |
| | ATATATACTTAACAAAATGTTACATGTACCTCATACATTTATACAAATAGAAAAAA |
| SEQ ID NO: 539 | TGACAGTGCTCAGGGTCTAAGACAGGCACACAAGAAACATCACTACTACTGCATGGCCTTC |
| | TTTAGCAGCATGTGGAAATGTTGCAAACCATGGGAAGGCTTGGATTAACCCCATAAAGGGA |
| | CAAAGCAAGGAAAGAACTGGCTGGGATTCCCAACAATCTTGGAGTTCAAAGGACCCATGGT |
| | AGGGCTGTTCTGGAGTGTTGGATGGGATGATAATTATTAATAGTTCCATCTGGTTCCTATAA |
| | AAACAATCACTTCAAAAACATTGATTATTAAAAGCCTCATAGAAAATTTATTTTT |
| SEQ ID NO: 540 | AATTTTTCTGCATTATCCAGTGAGACCAATATAACAAAAGAATTTTACATGTTGAAGAGGAA |
| | GGCAGAAGACCCAGAGTCAGAGTGATGCAATGTGAGAAAGACTTAACCAGTCTTTTGCTGG |
| | CTTTGAAAATGGAGGAACAGACCATGGGCCAAGGACTGCAGGCTGCCATTAGAAGCTGAG |
| | GGGGGAAAAAAAAAAGAGTGGATTCTCCACAAAGGACCAGAGCCCTACTAACTCTTTGATT |
| | TTAGTCCAGTGAAACCCATTTTAGACTTCTGCGTATAAGAATTATAAGATAATACA |
| SEQ ID NO: 541 | TGCCTCAGCCTCCCAAGTAGCTGGGACTACAGGCCCCTGCCACTACACCTGGCTAATGTTTG |
| | TATTTTTAATAGAGATGGGGTTTCACCTTGTTGGTCAGGCTGGTTTTGAACTCCTGACCTCTG |
| | CTGATCTACCCGTCTCGGCCTCCCAAAGTGCTGGGATTACAGGCGTACAGGCGTGAGCCAT |
| | GGTGCCTGGCCTATGGTATTTTTTAATTATGTAAAATAAAGTAAAACTTATGTAAAAATTAC |
| | TTACAATTTTTCTTTAAAAATTTAAAGTAGTAGATTACAAAAAGACATGAAG |
| SEQ ID NO: 542 | GGGCTGGGTGTGGGGTCTCATGCCTGTAATCCCAGCACTTTGGGAGGCTGAGGCGGGTGGA |
| | TCACAAGGTCAGGAGTTCGAGACCAGCCTGATCAACATGGCGAAACCCCATTTCTACTAAA |
| | AATACAAAAATTAGCTGGGCGTGGTGGCACGCACCTGTAATCCCAGCTACTCAGGAGGCTG |
| | AGTCAGGAGAATCGCTTGAATCTGGGAGGCAGAGGTTGCAGTGAGCTGAGAACACGCCATT |
| | GCACTCCAGCCTGGGTGACAGAGCGAGACTCTGTCTCAAGAAAAAAAATGGAGTGG |
| SEQ ID NO: 543 | CCCAGAAAGTTCATTGAGAAAATCACTGGTTTAGACAGCTAAGACTAATCCACTAGTGAAA |
| | TTTATCATCTTCCTTCAGCATCTTTCAACAACATCCAAAAGTCTATATTTTAAAAGATAACCA |
| | CTGCCTTAAATAAATATAATTGTGTTTGTATTGGTTACATTATCTGGTGGCACTGTTTTCAGT |
| | GTAACAAATCATCAAAATGCATCCTCCACATATTTCCAGGGTCCAATTAAGTTGAAAGATTA |
| | TCCAGTAGCTCTTGTTTTCCTCACTACTTAATAGTTATCAAGAATTCTCCT |
| SEQ ID NO: 544 | CAGTTAGTAGGAAAGTATTTTCTGAAAGATAAAGATTTATGTGAATTTATATTAAGACTGGA |
| | CAGTTATCTTCAACCTAAGAATCAGTCTCTAGAATCCAGGATGTTACCTGCTACTCTTACTTT |
| | TTCACACATCCAGTACAACGAACGAACTTAGCAGTTACAAAATATTTTTACTATGCTTCTTC |
| | AAGAAGCAGAACAGACCAAAAGCAAGGTAGAAAAGAGAGTGTACTTTACTTAATAATGGT |
| | CTTGTAAAAGCCAAAAGTATATACTGAGTTGGTGAGTTCAAACTTGGAGGCTG |
| SEQ ID NO: 545 | CAGGACCCCTCTGGAATGACAGTCTTCTGACCTAATATTGCACAAGGATAAGACAGAGAAT |
| | TTCTTTATGTCCAGCTCCTAGCCAGAACAGTAAAGAAAGGTTACAGTAATTATTCTAGTTTT |
| | TATGGCTGGCTTTGGAAAAGAGAAGTTCTAGTTTCTATGACCCACCTTGGGGAAGAGGAAT |
| | TCTGGTTTCTATGACTTGCTTCAAGACAGAATGAAGGGTAAGAGACAGCAAGGCAGAAAAT |
| | CTAAGAGACCTTGGTTCTGAGATTGCTTCTGAGGCCTTCTGACATCCTTTAATTT |
| SEQ ID NO: 546 | TTCTTGGTCCTGGGTATGAGCCCCATATCCTAGGTCACCAACCAGATTGAGAGCCCAGTCAA |
| | AGTTCTTTCTCATGGTGTGTCTAGGACGTCAGAAAACCTAGAGATGTGGCCGGACTCTGAGC |
| | CCCCTGAAAAGGGTTCCCAGACCTTTTGTGAGAGGGAGGCTTTGTCTGCCCAGAGCCCACCT |
| | AGTCTTGGAGTCTTGGAAGGCTGCCCGGCACCTCAGGTAGGCCTGTTTGCACCTCAGCCTCA |
| | CCCTGGTCTGGGTATCCACTCCATACAGACATGTTTTTAAAAATTGAGGAAT |
| SEQ ID NO: 547 | CTCATGATCCACCCGCCTCGGCCTCCCAAAATGCTGGGATTACAGGCATGAGCCACCGTGCC |
| | CGGCCCCCAAAATACATGTTTTTTAAAAAACGATAGTGAGTGTAAAATGGAATCATAAAAA |
| | TACTCCATTAATTCAGAACAGAAGGAAAAAGAGGGAAAAAAGGAACAAAGACTAAATAGA |
| | ATACATATAAAACAAATAGCAAGATGGCAGATTTAAATCTAACCAATGTCAATAATTACAT |
| | TAAATTTCCCATTAAAATGCAGAAAGTATCAGATTGATTTTTGAAAAGCAAGACCA |
| SEQ ID NO: 548 | TTTTGGTGACTCTAAGACATTTTACTTACTACTGTCACTTGCAGGTCAGAGCTTGCCAGCTCC |
| | CAAGAGCTTCTCTAGTGCCAATTAGCTTTCTTTCAAAACAATATATAACGTTTCTCTTTCTAG |
| | TAAAATCTCCAACTTTCTCTGTTCTTCAGACATACAGAGGACCAACCCAGTCTGTGCATATG |
| | TCTCGAATTGCAATTTTGTGATTCCCAAATAAAATGTTTAGAGATTCATCTCTATATTTTATT |
| | TTGACTTTGACAGTACTTAGGCCAAAATTAGGAGTTAAATATAACAGAA |
| SEQ ID NO: 549 | GGGAGCTAGAGTAATATTTGTAGGTTTTACGGCTGGCTTTGGGGAAAAAGGATTCTGGTTTT |
| | TATGACCTGCCTTGGGGAAGAGAGATTCTAGTTTCTGTGGCTAACCTTGAGGGAGAATGAT |
| | AGATCAGAGACGGAAGGGCAGGAGGTCAGGGAAAAGCTTCTGCTTCTGAGGCTGCTGCTGA |
| | GGCCTTCATTTTGGGTTATAGTTTCTGAGCCCCAACAATATATCAAAACATCACACTCTGTC |
| | AAAAATGTATACAATTATGATTTGTCAATTAAGAATAATATTAATAATAAAAAA |
| SEQ ID NO: 550 | CTCTTACGTAGTGCTGCTGGGAGTGTATAATTTTACAAATACCTGGAAATTGGCAATTTCCT |
| | ACAAAGTTTAACGTACGTTTGCCATATGACCCAGCAATTTCACTCCTTGGAATCTACCTAAG |
| | AGACATAAAAACATATGTCCTCACAAAGATATGTGTTTGAGTGTTCAGAACAGCGTTAGCC |
| | ATAGTAGGCCCATACTGAAAACAATCCAAATATCCTTCAACTAGTAAACAGATAAACAAAA |
| | TGGTACTACATCCATGCAAGGCAATATCATTCAACAATAAAAGGGGACAAAAAT |
| SEQ ID NO: 551 | GGCACGGTGGTGCACGACTATAGTCCCAGCTACTTGGGAGGCTGAGGCAGGAGAATTGCTG |
| | GAACCCAGGAGGCGGAGGTTGCAGTGAGCCAAGAGTACGCCACTGCACTCCACCCTGGGTG |
| | ACAGAGCGAAACTCTGTCTCAAAAAAAAAAAGAGGAGGCTAGTGTTGGGAGCAGCTGGTA |
| | ATGGCCAGTGGTCTGCCAGCTGAGAAAGAATGTCGCAGCATTTGGGTTCACACTTTGCCCCT |
| | CACATGTCGCCTTGCTGTGGTTGAAGCAGGTGGGCTGAGTTTTAAAAGGCCATCCT |
| SEQ ID NO: 552 | AATAAATAAATAAAATGTTGTTAAGGGGTGATCAAAAGAGAGTAACATGCATACATTTATA |
| | ATTTTATGACAAATCTGCAAAGTGTGTGTAAGAAAATTAAGGCAATATATTAACATACCAC |
| | ATTGTCCTTGTGATGAGGCTCTGCTTTCTTGGTTCTTTCTACTTTCATACTTTTTCACAAGAA |
| | GCATGTATTATGCTTATAGTTGGAAAAATAATAAACTGAATGTTAAAATGAAAATAAAAGT |
| | AAATAAATTCAGAACTTTTAAAATGTAGTATCATAAACTAAGAGGTGTATAAAG |
| SEQ ID NO: 553 | TGGATGGATCTTGCTGCACGTTTTAGAATGAAGTCTGTGAGTTGCCATGAAATGGGCTTCCA |
| | TGATTATGATATAGTGGCTCATCGGTTTGTTTGGATTCACTTAAGCTGTGGTGACAGACATG |
| | CACTGAGCCAGTGAATGGTGGAAAATATCCTCTAGGGCTCCTCATTAGTCACACTAGAGAC |
| | TCAAACATCATTTAAAACATATAAGCTTCATATGACTTGATCATCCAGTATGTGAATTTTCTT |
| | TCCAAATCAATCAATCGTTCTCTCCCACATGCCTCCATCAAAACAAGTTATC |
| SEQ ID NO: 554 | ATCAATATTTTGAAGAATTAGTTCAGGAAAGTCATTAAATGAACAAAGAACAATAATAATA |
| | GCAGCAATAACACAACTCTGAAGACAAGGGATAAAATTGATTTCCATGGTTGTATTTCCAT |
| | GCTGTATTATTTAATATGTGTGACTGTTAAAAAATGAGGTACAAAAAGAAACAGGAAAGTA |
| | TGAACCACACACAGAAGAAAAGCCAAGCAAAACAGTCAATAGAAACTGCAACGATGAAGC |
| | CCAGATGTTGAACTTACTAGACAAAAGTTTTTAAATTAGCTATTAAAATATATTTTT |
| SEQ ID NO: 555 | TCTACAGAGGGCAGTCTCAGGTTTGCCATGTCAACTCTTCTCTCTCTCTCTGTGTGTGTATGT |
| | ATGTATCTCCGTGTGTGTGTGTTTGTGTGTGAGAGAGAGAGTATGATGGTTGCATACACATT |
| | AGAAAATTAGGAGAGATGCCTGCTCTTTCCATTATTACTGAATATTGTTCTGAAAGTATTAA |
| | ACAATATAATTAAATAAGAAGGAAGAAATCAGACAGAATAAATATTGTAAAGTAGGTAAT |
| | GTTACTTAAGAATAATACAATTTTATATGTGAAAATTATAGAAAATCAGTTCT |
| SEQ ID NO: 556 | ATGCATTACAGAAAGTATCTTTAAGATTCTATTGCAAAAATAAGAAGACTATATTTCTAACA |
| | TTAACGGTAACCATTTCCATTTGGAGATATAAATGTGTGATTTTAAATTTCTACAGTAAGCA |
| | TGAACTACATTTAATAAGGAAAAGAGCTGAAGCTATTTCGAAATAATTTAATGGATCAGTT |
| | CACATGGCCAAATAGATAAGAAATACTCTATTTAAACTCAAAATTTAGTAAGATATTCTCTA |
| | GAGGTCATAGTGCCAAAATTGTATGTGTGTATGTTTATACCCTTACCTTCGTC |
| SEQ ID NO: 557 | CGGTCAATCAGGTCCACCAGGCTCTCATCCTATACACAGCTCCTGGCATCCAGACTAGATCC |
| | TTTAGAATGCAGGATTCTCTGTTTAAAAAAAATAGTATTTTTATTATTTAACTGATTTTCAAC |
| | CAGCAGTCATGATTTATAGAAACAGATTATTTTAGTTTCAATTTTATAAATGACAGAGATGT |
| | TTTAACCATGAATGGGTACAAAATAATAGCGTGAATAAGACCTAGTATTTATAGGACAACA |
| | GGGTGACTACATTCAATACTAACTTAATTGTACATTTTAAAATAACTAAAAG |
| SEQ ID NO: 558 | GCACATTTAAGACAATCTCCCAGAAAGTAAAATTTAAGGATGGAGAATTTGAAAAGAAGGA |
| | AAAGAGAAAGAAGATCTGTCCAGGAGGCCCAATATTTCAAATAGGAATTTCAGACAGAGA |
| | AAACAGAGTAAATGAAGAGAGGAAATTAACAAAAAAATAATTTATGCAAATACATCAGAA |
| | CTGAAAAACGTGAGTCTGCAGGTTGAAGTAGCTCACTGAGTGCTCAGCACATGTGTGAAAT |
| | GAGTCCTACATCAAGAAATGTAATAATAAAAAGAGATGATCATTAACACCTTTTTAAA |
| SEQ ID NO: 559 | ATCCATCCCTCTCTCTCTATATTAATCCATCCATCAATCCATTTCATTATCTATGTATGTATGT |
| | ATGTATATCTATCTATCTATCTATCATCTATCCATCCAGCCACCCTCTGTCTGTCTGTCTGTCT |
| | GTCTATTGGTCTATCATCTATCATCTATCTATCTTTATGTATCTTACTGAGAACTTGATACTT |
| | AACAATGAAAAGAACAGATGAAGACCTCCTCATGGAACCTTTGTTAAGCGATTAATGGAGG |
| | GTGTGTTCCAGCAAAATACGGGAATAAATCAAGTAAGAGGAAAGCATA |
| SEQ ID NO: 560 | AAGGCAATGGCCAATTTAGATTCTGAGACTCTGGTGAGAGTTAAAGCTTTAAGTTCTGTGTT |
| | AACAAATCTCAGTATTTTACGCTTACCCTCTAGAGTTCTTTGAGTTAGCCTCAGTTGCAGCC |
| | ATTTTCTGATAATTTGACCTGAAGGTTAAATTCTTGTAGGGAAGGGTTTCTAAATTAGTTAA |
| | CTGTGTTTAGGATTAATAAATATTCCTGAAAATCTGAAATGTATAACTCTAAGTTTTTCAAA |
| | GCAGAAAGCAATCTTACATTTCTCTTTATTTGCTTTTAAAATAAAATACGCA |
| SEQ ID NO: 561 | AGCTATCATGAGCATCACTGTCCATTGTCAATTTCTTATGATCATGACACTGCTTACTATGGT |
| | TGTGATAAGGTAGCATGGTAAACTTAAAATACACATGCACACCGTCATACACACATTTAGC |
| | TAGACCTTAATAATAGTCACATTTAAAATAATCTGTTGCTACTGAGTAATATCTTCTTCCAA |
| | AGTGTCATAACAGTTACATAAAGCATTCCCAGAGTCAGAACCTTCAGAAAATAAAGCCAAT |
| | TATTTTCTCGATGCAAATTCTCCATGTAAATGTCTTTCCTAAAGATGTGGTCT |
| SEQ ID NO: 562 | ACCCTCAAGTTAACATGATGGAGGCTGGAGATAAGTAGAAGTAGTAAAGAAAGATATTCCA |
| | TTTTGCTGACTTAAGCAAGTCAGATACTAAATAGAAAAAAACATAGGGTAAGGAGCAGGTA |
| | ATTTAGTGGGGATTGGGAAGAGAACTTAATAAATGCAGGTTTGGATAAGTTGAAGTTGAGA |
| | TTCCTTGTGAGCCAGCAAACTGGATGTATAAATCATTCTCTTAGGTTTATATGACTGGAGAT |
| | CACAAGAAAGATTTGAATTAGAAATTTTTAATTGAGAGGTTTCACAATATAAATA |
| SEQ ID NO: 563 | ACATCAAAACAATACCACTGAAATGGCCTGTCAACATTTCTTTGATCAAGGACTGGCACTAT |
| | GGCCCAGAAACACAACAGCCAAGTGACAAGAGAAGATAGTAATCTTCCAGCAATTATTCAA |
| | CTTTTCAGTTCTACTGTGCTCCTAGGTCATACTAGGGAAGCTGAGTGTTTCTCAAGTAGACA |
| | CATGACTGGAAAATTATCAGTTAACCTTACTGAGGCTTCCTAATGCTGCAGCAATGAGACTT |
| | ACTCCACTGGAGTCACACTAGAAGGTTTTAGTCAAATTTAAAAATGGGGCCAG |
| SEQ ID NO: 564 | CAAAACTACACTCAACCTACACATCCATTGTTAGTTGAACTGCAGTATATTTGTACTGTAGA |
| | ATAATTACATAGATTTATATATATACCAGTCATGTATATGCCAGCATGGAAAGATCTCCAGC |
| | ACATATTGAAAAGTGGAAAAAGTAAATTGTGATATTAGGTATAGAATTATGACATTTGGTA |
| | AAAAAATGTGTTTAAAAACAAAATTATATGTATGTATGTGCATAAATTTACACACACATATA |
| | TAAATATATGCATGTGTATATATCTTACATATTGCATGGGAGGTGATCTGGGG |
| SEQ ID NO: 565 | GCAAAGTCACATCTTGCATGGCAGCAAGCAAGAGAGAGAGAGAGCTTATGCAGGGATACT |
| | CCTCTTTATAAAACCATCAGATCTCATGAGACTTATTCACTATCACGAGAATAGCACAGGAA |
| | AGACCCACCCCCAGGATTCAATTACCTCCCACCGGGTCCCAAAGAAACGCAGCAGGCAGCA |
| | CCCACACTCATGCTGACTCTGATTGTCATCGAATCCTCTTCTCTCCAATTCCTAGTGGAGCAA |
| | AAGAGAAATTTCCAAAAAGCTATAGTGAGGAAAACAGGCATAGAAAAATGGGTA |
| SEQ ID NO: 566 | GTAGTTAAAAATGATCCAGGGCTAGAGATGCCCCAGGGACTTTGCAAGAACAAATACAAAA |
| | CCTATTAGAGGGAATGCGTCCCCAAGGCAAGCCTCAAGTAATTCCCATGAATAAAGGTCTA |
| | ATTAGAAAGGTTTATTTAAAAACAAAAAAAACTCTATAATACACATGAATGACAATGGCAC |
| | ATAAGCAAGAACCAGGAGAAATAACAGAAGAATCAAACCTAAAAGATATTAGATAGTGGA |
| | CTTAACAGGCACAGAACAAAAAAACACATATATAATGTTTTAAGAAGTATAAGATAT |
| SEQ ID NO: 567 | AAAATACACCTGTATAGTGGAGCCATCTGGTGGTCACCATTTGAACCAAACCATCAAATTTA |
| | GTATCAGTAATAGTGGGACAACCTCCAGTTTACAGAGAATACAAGAGAAAGGGTTGTCATG |
| | CAAATCTGATAGTACTAGCAAAGATAATTATTCTAAAAAAAAAGTCGTAAGACTATAAGCA |
| | ATAAATAGTTATTGAGCAGCTGAGTTAGGCATACTATAGTCTCAGTTTCAGTATCTAACCAG |
| | CTTCAAGTCACCATTTCAAATGAAATATCAACGCGTGATGAAAGTTAACTTACT |
| SEQ ID NO: 568 | TGAAATAACATGAAGAATTTTTTTCTGACCACAGTGATATGAATAAAATGGTATAAAAGGA |
| | GAAATTCTGGGAAATTCACAATATGTGAAAATTAAACAACATGGTTCTGAACAACAAATGG |
| | GTCAAAAAAATTAAAAGAGAAATTATAAACATCTTGAGACAAGCAAAAATAGAAAAACAA |
| | CATATGAAAACTTAAGGGATGCAGCAAAAGTGGTTCTAAGAGTGAAGTTAGACCTACATGA |
| | AACATATAAACACCTGCATGAAAACAGAAGAAATATATCAAAGAAATAACCAAACAC |
| SEQ ID NO: 569 | CTGTAGAGTTGGATTTCCTCCTCAAAGGGTAGCTTCCCAGCAAAGCCACATTACTGCTTCCA |
| | AAGCAGGGAGCTCACCAGTGTATACTTCCTGATTTTTCTGTCTACTTTCCCTAACTTGGGAC |
| | ATCTGATCGTTCTGCCAGGCCATGCAGCAATTCCTTTCCTGTCCTCCTGTTCATCTGAAAAAG |
| | GCTTAAGCCAGCTCTGCAGCTGAGCTCTTTGCATTTTCTAAGTCCCCCTTCACATACCTGAG |
| | GTCCCCTTGTCTTCATATGATCCCCGATGTAGTCTGGCAAAATTAATGTGT |
| SEQ ID NO: 570 | CTCTGCTTCTCTCTCTGGGGCTGCTTCTGTCGGGAGTGGGGTGGGGGGTCACTCTGTTCCTTA |
| | GCACTGTGGCAGAGCACATGTCAAGATGAAGCTCTGGTGAAGAATTGATCAAAAATAGTGG |
| | CGGAGTGAGATGGAGATTTAAATCAAAGGGCTGATTTATGAAGGCTTCAAAGATTTTTTTTT |
| | TTTAAAGAAAGAACATAGATTAGTTGTTTCTGAGGGCTGGAGGGGACAGAGATAGAGGCGG |
| | CGACGGAAGGATCCTTCAGGTTTCTTCTTGAGGTGATTAAACGTTCTGAAATC |
| SEQ ID NO: 571 | GAACAGGATCTCTAACATGCTAACAGAGAATTGTCAACCCAGGCTGTTCCAGAATGAAAAA |
| | GAAAGACATTTTCAGAGGGAGGAGAACTAGGAATTTGCCACCAGATGATCTGCTCTAAACT |
| | AAATGGGGAAGGAAGTTCTTCAGACTGAAGGAAAATGATACCAAAGGGAAACCTATAACT |
| | TTAGTAATTTTGTAAAAACGAAGAGCAACAGAAATTATTTTAAATGGATAAAAATAATAGA |
| | CTTTTTTGTTCTTAAGTTTTTCCAAATATGTATGATTATTGAAAACAAGAATTGTTT |
| SEQ ID NO: 572 | TTAAAGCAGAGGTGGTATGCTCCTAGTCATGATGGAATAACAGACTAAATTTATACATAATT |
| | GAAATAATAGGGAAAAAGCACACAAAATATAGGAAAGAACAGTTTTCCAACATTGAAAAA |
| | CAAGTAAATAACGGCAGTGATCCCCAAGAATCAGACATCAAAGTAAAAGAGCCCTAACATT |
| | GCTCTAGCTTACTGCCTGGGGAGAGTATGCAGCATAAAACAGATCAAACCAGTAGGACCTG |
| | GGCGTTTTCCCTGAGTTGAAGAGGCAGAGGTCAGGGTTTAAGAAGGCTAAGAATTC |
| SEQ ID NO: 573 | ACCCTGAAAGTCCTAAGAACTGAACATTTTAACCAGAGTTTTATTTAAAAATGGATATCTGG |
| | CTTCTGCATAAATTGAAAAACACAGGCTGTTTGGAAGCCTCCCTACCCACTCCCTGATTATT |
| | GAAACCATTTGTGTGCAATTTTAGCTTAACTTTTCTTTGAAATCAAATATTGCTTTTGGATTT |
| | TGGTGTTATTTTAAAATTTGAAAATTAGGCTCAAACAATATAAACTAAACTGAACAGAAGG |
| | CATCCTGAAATCCTAAAACTATTTTTTAAATTTTATTTTAAAAAATAAAAGC |
| SEQ ID NO: 574 | GTTTTCACCAGGTTGTCCAAGCTGGTCTTCAATTCCTGGGCTAAAGCGATCCGGCCACCTTG |
| | GCCTCCCAAAATGCTGAGATTATAGGCGTGAGCCACTGTGCCCATGCCCACCCTCATCCCCC |
| | AAGTCACTTTAAAATCTGGACTTCATTTCATAAAGATACAGCCCTAAGAAATATTACACATG |
| | CTCAAATGAAATTATTTAAATCCTGTTCTATAGAAAGTGGAATCCAATAAAAGAAATTGAA |
| | GGTAATAATATTCACTTGAATGTGTATGTGTTTTTCGGAATTTAAAAGAAACA |
| SEQ ID NO: 575 | GCCTGGGTGACAGAGTGAGAATCTGTCCCAAAAAAAGTCCCAAAACCAACAAAACAAAAA |
| | CAAAAACAAAACCACCCATGGTTTACTGTAATGTCCCTGCTCCCTACTCTACTGGCAAAGGC |
| | CTATCTACCTTGTCTCAAGGCAATGGCAGTCATTGTCAACTCGGGGAGGCTTCTGCTTACTT |
| | AGTTTTGGGATCTCATGAACCCAATGGTCTCCCAAGTTGTATAATCACTGCTACTTAATCAA |
| | ATGGACAACATTTCTAGCTGAGCCACCTTGCATCCTATGAAATATTGTTACAAT |
| SEQ ID NO: 576 | AAGTATAGCAATATGGGAAATGCTTCTCTTTAATGAACACGAATATGCACCAGATTAGCATT |
| | ACACTATTTGTAGTTACATACTTGGTCATAAGAAAATGAATAACATTGGGTTAGCTATTTGC |
| | ACGTTAGGCTTTTCATACTTTATTTGCAGAAAGAGAGAATTGGATTAGATCATTTGTTTTCA |
| | ATTGATTTCCTAGAAGTATTTATTATGATGCCTAAAATATGAACTCAATATTTTGAAAAATC |
| | CTTTATTTACTATATATGAAAAGATAATACGTTTATTAGGAGATGATTTATG |
| SEQ ID NO: 577 | TGAATCTCAGGCCAAATCCTGAAAACCACTTACTACCTTGACCAGAAAAAGAAAAGGTGTG |
| | AGTGATCAGTTTGTTAAGTTCTGCAAAATGCATGGAATTTTCATGAATGACTCTCATTTTAC |
| | CCAGGCTGTTCCCATCCTAAAAAGTAATATATGCCTTGCAATCACCCCTTCAAGGCAGGTAA |
| | AACCCTGATGGGTATGCAGAGGCCATTTGGTATCTCTGGGTAATATGAATGCAAAGGACTG |
| | AGAATGAAGCACACTGTTTATTTGGCAGCACTGAAAAAGAAGAGTTAAAAAAAA |
| SEQ ID NO: 578 | TAACACCAGGACCTTAGCCACTCTTCCCAAATCTCCCTTGGTCATTTCTGGGAGTCTCCAGA |
| | GTGATGTCTCAGGCATGTCCTGTAACAAATCCACCCATGTTTGCCTGCTCCTGCTGTCACTG |
| | CTGGCTATCCACTGGGACTTCATACTAGACTGCGGGCCCAGATGGAGAACAGGCACATGCT |
| | ATCTCCTTCCACTGTTCTTGGCCCTTCTATCCTCCTATTTCCTCAACAAAAGAAGCAACAGAA |
| | ACTAACAAAAACTCTCTCCTCCTTAAGTTGAAAAAAAAAGGCTTATTGCTTT |
| SEQ ID NO: 579 | TCTGTGAGAAGGCAAACACCTTACACAGTGTAGGTGAGGGGAGATTCACGCACCTGGAACC |
| | ACCCAGGCTGGCCGAATTAAGCCTAAGTCACCTCTGGTAAAGAGGGAAGGAGGGTCCATCC |
| | CTGGTTCAGTTACTGACACCATAGGTGTAGATCACAGGTGCCTATGTCCTGCTGCTCTCCAC |
| | AGGGACACTTTTCCTTGGAAGAGATTTACCAAATGCTAATTGAGTGTTTGTTAAATGTTTAC |
| | TATGGGCCAAGCCCTGGGTTTTTCTCTATGCATTAAAAGTGTGAGTAAAGGGGA |
| SEQ ID NO: 580 | AATCCCAGCTACTCGGGAGGCTGAGACATGAAAATCACTTGAACCCGGGAGGCAGAGGTTG |
| | CAGTGAGCCGAGATCATGCCACTGGACTCCAGCCTGGATGACAGAGTGAGACTCTGTCTAA |
| | AAAAAGAAAAGGAGAGAGAGAGAAAAAAAGAAAATTACTGAAATAAATAAACAGAGGGG |
| | AAGGAAAGAAGGAACGTTACAAAGTTTGTGGGAGTAAACCAAAAATAAAATTCTAAGCAC |
| | CCCCAACCACTGAATGGATTCCCCCCTTGGCCAAGAGGATCCCAAAGAAAACCCGAGGA |
| SEQ ID NO: 581 | AAAGAGAGTATATGGAAACTCTCTATGCCTTCCATTCAATTTTTCTGTAAACCTAATACTGA |
| | TCTAAAAAATGAAATCTATTATAATTAAAAAAAGTTAGGGGGATAATAAAACAAAAAATCC |
| | AGAGAGGTGGTTACCAATATGAGGGTGACACAAGATGAGAAAAAACACACAGACAGATGC |
| | AGCTACATTAGTGATATTCTAGTTCTAATATTGGGTAGTGGTACATCACAGATGTTCATTTTA |
| | CTATTATGCCTCATAACTTGCATACATAAGATATATGCTTTTCAACTACTGAGT |
| SEQ ID NO: 582 | CTACTATGGAAATAACTGCAAGTAGCTAAAGAATGGTAAAAATCTTTGGAGAACAAATTTT |
| | AGGATCAACCTTTGCAAGAAATTGTACATCCCTGTAGAGTCTCCTAGGAAGAAACTAATCTT |
| | ACTACAGTCATAGCTAGAAGAAAGGACAGACCTCACTTCCTACAGCATGGGGGAAAACTAT |
| | CTAGTATCACAGTGAATTTAAATAGGGCTGGTGTAGAACTGGGAATATGTTTTAACCAATTC |
| | TCCAGGTTCTAATGGGAATGGCTATTGAACCACTCTCTATAAAACACAATGTTA |
| SEQ ID NO: 583 | GGTCATCAGAATTCAGTATTTTAAAAAAAAATCCCCTGCAATTCAGATGCAAAGAATTCAC |
| | GGACTAATATGTGGGAACCACAGGTTTCAAGGAACAAGTGTTACAATTGTCTTTCCCAATTT |
| | AAAAGCAAAAAATGGAGGTTAAGCAACATCGCTTTGGTTGCACAGTTAGCTAATTGCATAG |
| | CTGAGATTCTTTCACAGGCAGCTTGACTCCAGAACCTGTGATTTTTATACCATACACTGCAG |
| | TGGCCATTAAGGCCATCTCTGCTGATGATGTGAACAAGTTGTTTAAATATCTTA |
| SEQ ID NO: 584 | GTTTGAGGATATTGGTAACACAAGTGGTTGCTCACTACAGGTCCTCGCTGGAAACAGCACT |
| | AAAGAACCAGGATGTGGACTGACTCCTCTGTGCAAGTCACCGACAGTGCCCATGTTTATACT |
| | GTAGGCCCACGAACCAAGCAGCCATGGCGGCAGGGACGGAGGTGTGCATGGACTCAATCA |
| | CCATCTTTCCCTCACCAGAGCTGACTCAGCTGCCTTCTCTGCTGAAGCCCTAAGTGGAGACC |
| | AAGGCTGAGCTATGGCATCTTAATTATGAGGCATCCCTTCCAAAAGGGAAGACAG |
| SEQ ID NO: 585 | ACCATGCTGCAGAAATCACAGCAGCAATAAACACGGCAGGCAAATGTGTCAACCCCTGGGG |
| | AACTTTAACTTGTTTTCTGCTGTTGTAGTGAGATCAAGTGTGTGTGATTCAACAAGACGGGA |
| | CATGTGAAACTTCCCTGTACCCCTCAAGCCCAGCACAGAGCCTCATCCAGAGTAGATGCTCA |
| | ATGATGACACCTTATAAAACAACAAATAATAGCCAAGACCTCTCCTAAGTCTGCTGAGGGG |
| | TAGCCACATGGCTTCTTAAAAGTCAGAGGCCATTTGCTATTAAAGAAAGCCATG |
| SEQ ID NO: 586 | CCAGCTACTCGGGAGGCTGAGGCAGGAGAAACACTTGAACCGGGGAGGCAGAGCTTGCAG |
| | TGAGCCGAGATTGTGCCACTGCACTCCAGCCTGGGCAACAAAGCGAGACTCCATCTCAAAA |
| | AAAAAAAAAAAAAAAAAAATTCCTGACAATCTCCCGAGTTGTTCCTGAAGGTTGGTTTTCC |
| | ATGCGCTGGTTGTGTGTGTGACGCTGTACAGGAACATCAGTGAGTCAATGCATAAAAGAAA |
| | CTGCAGTAGACAATATACGATAAAGTACAATGCACAATATACAAAAAATAGAAAAAA |
| SEQ ID NO: 587 | GAGAAACCCTATCCTCAAACACTGAGTCTGGGCCATGTTCTCTAATGTGGGCTAACTGCTTA |
| | GTACCCAGTACCTACAAACAAATACTTACTTCACAAATACATACATAAATACATGAATGGA |
| | TATATTTTGTTAACTCTAAAATGCTGTCAATTGAACAATGTACCATCAGTTCAAAAGAGATT |
| | GCTCAGAAGAGGGAAAAAAACCACCACATTGACTGCAAGACACATCCCCAAATCAGAAAT |
| | GTTAAAATGTGCATGGGGATTGGTGGGGGATGTGCAGCTTAGAATTGACTGAGTA |
| SEQ ID NO: 588 | AGAGACCTGGTGGGCAAAATGGAGCAAGAATTTCTGGCCTTTTGACAAACATCTCCACCTA |
| | CTCCTCTTTCCCCATTTCTGAAAACTCCTTGCAGATAAGAAAGGCTTAACAGCAAAACCCCA |
| | TGGTGGAAAGTTTCTTGCTTTTTATACCACTTAATTTTTATAATAATTTTTCCTTCCTGCTATG |
| | ATGTATTCGGCAAAGCCATAATGAAAAACTAAAAACACAACGTAGTTATTCATGTTAAACA |
| | CTTACAGGTGCACAGAGCAACACTAGTTAATGTCAAACATTTCTGGTAACTA |
| SEQ ID NO: 589 | ACAATCTTGATTAGATATATGTATAGCTATGATTGTTCAACTCTGTGTAGCCAAGCATATTG |
| | TGGTTGTATTGTCTAGGAGTCTTGACTGAATTATCTAAAAAACTTCAAAATTGTAGTGGCTT |
| | AATAAAATATAATTGTATAATTTTCCCATGTAATGGTCCTAATTTACAGTTCAGATTGGATG |
| | ACAATCTATCCCTCTCCTATAAGTACTAACTCAAAGACCTTGGCTATTTACCTCTGAGGGTC |
| | CACCACCTCTTAGAAACTTGTCATCAGAGATTGCATCTAGCAAAAGGAAGAA |
| SEQ ID NO: 590 | ATGTGATTCTCCTGCCTCAACCTCCTGAGTGGCTGGGATTACAGGCTCCTGCCACCATGCCC |
| | ACCTAATTTTTGTATTTTTAGTAGAGACGGGGTTTCACCATGTTGTCCAAGCTAGTCTCGAAT |
| | TCCTGACCTCAAGTGATCCACCAGCCTTGGCCTCCCAAAGTGCTGGGATTAGAGGCATGATG |
| | CACTGCGTCCCGCTCAGTTTTTTAAAGCATACAATTCATTGTTTCTCAGTCTTTTGGCTAAGA |
| | TCAAATGTAGTATCTTTTTTTTTTTTAAGACCAGTGGTTCAGAATAGAAA |
| SEQ ID NO: 591 | TAAGTCTGACTAGGGGCATCTTGGAAGTCTTCCTGGAGGAGGGGCCAGTTGAGGAGGACTT |
| | CAGATGTTAAGATGTTTGAGAGGAGAAAACTGGGGAAGTTATGGGGAAGCAACAGGACAT |
| | TTAAGCAACAAGGACATTTAAGTTGGAGATTAGAGGAAAGGCCGTATGCAGTGTCCTTCCT |
| | CCCTAAGGTCCCAACTTGGCTAGGGTAGCTGGCTGTTCAGTTTTCCCTTGGAAGTGACAGAG |
| | CCTCTCTCTGTTTTGTAAAATGTCACCCAGTTTTTGTTTCCAGTTTGAGGTGCATA |
| SEQ ID NO: 592 | TATAAAACTGTGTCAATGGGCTTATAACACAAAAAGGTGCCATATTCATGATAGAATAATG |
| | GAAGGAAGAAATGAAGCATAGTTTTTGTATGCTATGAAATTAAGTTAATATGAACTAGATT |
| | ATCTTAAGTCAAGTTATTAATTGAGGGCCAGGAGTGGTGGCTCATGCCTGAATCCCAGCACT |
| | TTGGGAGGCCGAGGTGAGAGGATGGCTTGAGCCCAGGAGTTTGAGACTAGCCTGGACAGCA |
| | TGTGAGACCCCACTTCTTTCTAAAAAAAAAAAAAAAAAAAAAATCAATTGTTTTG |
| SEQ ID NO: 593 | TCACCCCTTTGGCTTCTTTATCTCCCTTTGGCTTCACGTTCATTGTCCAACACCTCCCAGACA |
| | AGTTGTAGCTCCTATATAAGCAGGATTGGACTACTGGCCTATATAAGCAGGATTGGACTATT |
| | GGCATCTCACTAGAAATTTTCTCCTGCTAAACCATACACTAACATACACAAAGGAGGCATTT |
| | CTCTTCACAGTCTCAAGGTTTTCCCAGCAGAACATCACTATATAATTATGATTAGTTGCTTA |
| | ATCTCCAAAACTTTCTACATTAGTGAATGCGCACATGAAACTTACTAGGCA |
| SEQ ID NO: 594 | TCATTCTATGGCTTAATTCCAGCTACTCAACTATTCTATCTAAACTACTCTAGTTTTTTAGGT |
| | TTGTAAAAAGATGTAGCGTTGTATGTACTCTTTTTCTTTGTTTCTAGTGTTATTTTACAGATT |
| | ATTTTTTACCTTTTATCTTAAAATAAGTTCAGGCCAGGTGCAGTGGCTCACACCTGTAACCC |
| | CAGCACTTTGGGAGGCCAAGGCTGGCAGATCACTTGAGGTCAGGAGTTCGAGACCAGCCTC |
| | GCCAACATGGTGAAACCCTGTCTCTCCTAAAAGTACAAAAATTAGCCAGGC |
| SEQ ID NO: 595 | GGTATTTGTGAACCGTCCTATAAACTTTATAAACTCTCTGGTATTTGGTAGAGGCTCAATAA |
| | ATGTCATGGTCCCCACCCTTCACCCTCCAGCCTTTCCACCTATATAAATGCAGGATCTCATTT |
| | AATCCTGGTTCTTAAAGTGTCCTGTGAAGCTTAGTGTGCCAGCCGGCTATTGCTCTGGCCTG |
| | ACATTCTGCCCCCAAATTGTGTGTGTGTTTGTGTGTGTGAGTGCACGTGTGTGTGTGTGTTTA |
| | GATCTTTTACAAGGGGGAAAGTGTTCATTATGTCTAATATAAAATACAGA |
| SEQ ID NO: 596 | CCAGGGCCGGGAAGGTGCTTCCACAATGCCATTAGGTAGACAGGCTCCTCCTGTCTTTCTTT |
| | CTCCCATCTTTAGTGTGTAGCTTTTATCTTCATGCTTGCAAGATAGTGAAGTACATTTAGATC |
| | TAATGTCTACATTATAGGCAGGCACAGAGTGAAGCGCAGAAAGCAATTAACAGTTGTATTT |
| | TTCCATCTGATCAGGAAACAGTAACTTTCTTGAAAGTCCCACACAGGAGACTCCTCACATCT |
| | CATTGGCAAGAACTGGCTCTCATAGTTATATTTTTGTATACAAAATTATTTA |
| SEQ ID NO: 597 | AGTGGCTCATCCCTGTAATCCCAGCACTTTGGGAGGTCAAAACAGTGGATCACATGAGGTT |
| | AGGAGTTCGAGACCAACCTGGCCAACATGGTGAAACTCCATCTCTACTAAAATACAAAAAT |
| | TATCTGGGTGTGGGGGTGCATGCCTGTAATCCCAGCTACTCAGGAGGCTGAGGCAGAAGAA |
| | TCTCTTGAACCCAGGAAGTGGAGGTTGCAGTGAGCCAAGACCACACCACTGCACTCCAGCC |
| | TGGGCAACAGAGCGAGACTCTGTCTCAGAAAAAAAAAAAAAAAAAAACCCATGCCT |
| SEQ ID NO: 598 | GGAGGTTCAGCAATTCCTGTGTGGTTCTAGGTGGGTACGTGGATGCCTTCTAAGTGTGGTCT |
| | CAGAAATCCAAGGTCAGAGTAAATCTCAAGTCATTGAAGCTCCAGTTTTTGTTAGAGTGGAT |
| | GTTTGGGCTACATCACTGCCCTGAAATTGCTGTGATTCGACAGGAACTGAGGCAAACCTTCA |
| | GCTATAAGATGAAGACCTAATGCATGGTGACTATAGGGAATAATAATGTATATTTGAATTTG |
| | CTAAGACAGTAGACCTTATGTGTTCTCACCACACACACACAAATGGTAACTA |
| SEQ ID NO: 599 | GTGATGGCGTTACAGTCGACAGTTCCATACCCTTCACTTCTGAGACAGTCCATGTTCCAATA |
| | GTCCTAACTGTGAAAAAGAATTCTTCTTAATATTCTTTCTATATATCCTTGTCAATGCCCTTA |
| | ATCTCATTATCCAAGTTATCATTTTTCTCAATCAGATGAATTAAACAAACACTTGAGTCCCA |
| | ATTATGTATTAGGCTTTACTCTGAACAGTTTCTTTACCATAGCCATTAAAATCATTACTGACT |
| | CCTTAAAAATGACCGCCCACCCACTTTTCTCAGTTTAACAATGGACTTCC |
| SEQ ID NO: 600 | TTATGCATACATACCTGTGATAAAGTTTAGTTTATAAATTAGGCACAGTAAGGGATTAACAA |
| | CAACTAGTAATACAGAACAATTAAAACAATATATAATAAAAATTATGTGAATGTGGTCTTT |
| | CTCAGGATACATTTTCAGACCACATTTGACTGTGGGAATACATTTTCAAACCACATTTGACC |
| | GTGGGTAACTGCAACGGTAGAAAAGGAAGCTATGGTTAAGGAGGGACCACTGTATATTGTT |
| | AGGTTAGTTTTTTGTTTTGCTAGGGAGGTTTTTCTATGTTGAAAATGTATAGAT |
| SEQ ID NO: 601 | TTTGGAAGGCTGAGGCGGGCAGATCACCTGAGATCCGGAGTTCAAGACCAGCCTGGCCAAC |
| | ATGGAGAAACCCCATCTCTACTAAAACTGCAAAATTAGCTGGGTGTGGTGGTGCATGCCTG |
| | TAATCCCAGCTACTCAGGAAGCTAAGGCAGGAGAATCACTTGAACCCGGGAGGTGGAGGTT |
| | GCGGTGAGCCGAGATCGCGCCATTGTATTCCAGCCTGGGCACCAAGAGCGAAACTCCATCT |
| | TAAAAAAAAAATAAAAATAAAAAAATTTTAAAAAGAAAAAAAGAAAAAGAATTAAA |
| SEQ ID NO: 602 | CTGCCTCAGCCTCCCGAGTAGCTGGGTTTACAGGCATGCGCCACCACGCCCAACTAATTTTG |
| | TGTTTTTAGTAGAGACAGGGTTTCTCTGTGTTGGTCAGGCTGGTCTCTAACTCCCGACCTCA |
| | GGTGATCCACCCACCTGGGCCTCCCAAAGTGCTGGGATTACAGGTGTGAGCCACCGCGCCC |
| | GGCCATGAAAATTGTTTTAAGAGCTATATGACTCTGAGAAGCTTATGAAGTACTAATGAAG |
| | ATTTGATGAACTCTCAAACAAATTTTTGTTTGCTAGAAATATAATTCTTGGGGA |
| SEQ ID NO: 603 | AAATGTGCAAAAACTATAAAACTCACTGGTACAGTTGATACTCAAAGGAGAAAGGAATCAA |
| | ACCTTATGGCTACTTAAAACCACCCAAATTGCAAAAATAAGATGGGAAGTAAGAAACAAAA |
| | ATTTATATAAAACAACCAGAAAACAATGAAGTGACAGGAGTAAGTCTTACTTATCAATAGT |
| | AACCTTGAATGTAAATGGATTAAATTTCCCATTTAGAAGATAAAAACTGGGTTAATAGATTA |
| | AAAACAACAACAATGAGGCCTAACTATATGCTGTTTATGAGAAACTCACATACTG |
| SEQ ID NO: 604 | TCTGTATATACATTAAAAAATATGTTTTTTTAATAGAGACGGGGTCTCTATTAAGTGACCTCT |
| | ATTTTTTAAGTGAGACGGGGTCTCACTGTGTTGCCCAGGCTAGTCTCAAACTCCTGGGCTCA |
| | AATTATCCTCCCCACTTGGCCTCCCAAAAGGATGGGATTACAGGCATGAGCCACTGCCCCA |
| | AGCCTAAAATTTTTTTAAGTACCGTTAGAATGTAAGGATTCTTTTTAAAAAATTTGATTGTGC |
| | AGGGTTGGTTATTCAACCAATATGCAATACAATATTCAATACTGTATATTC |
| SEQ ID NO: 605 | GTGAGGCTGGCTGGAGCAGCCACATTTTCCTGGCAGCCCTGTGCTTTCTTGGGCTGGTCCTT |
| | TGAGGGGGCCCAGTCCTCCTGAGGCTGTGGCCTTGACCTGCAGAAGCCATGCTAGAGTCCA |
| | GCTGTCTCTTGGTGCAGGGGTGTAAATGGCACACATTGTCAATGTGGGGTTCTCCTACCCCT |
| | CATCCCCCAGCACCCAGAGGGAGAGGGTGCCGCTGCGGCAAAGAGGCTTGAAGTTGGTTTG |
| | GTTTGGGGGATTTCTGTTGTGAGTTTTTAAAAATTGAGGTTAAATTCTCGTAAC |
| SEQ ID NO: 606 | TGGACCAAGCATCTTGTCTTAGCACCATAGGGTCGGAGAGGAGCCTATGATGTTTGTTATCT |
| | CAGCCTTCAATGGAAGAGACAAAGCTTTGTGTGGTATTTTACATTTAGAAACTATCAGAAAC |
| | ATGTATATTTATATTAGTTTCAGAAATATATACCTGTATCAAGCCTGTTATATCAGCTGCAA |
| | CAGAGATGTAGCAATTTAAAAATTTTAAGAGTTGCCTGGGTATATGAAACAAAAGATATAT |
| | ATAGCTTTAGCTGGGAAAAAATTTCAAAAATCCCATTGAGTTTAAGTTACACC |
| SEQ ID NO: 607 | CCTGGCCAACATGGCGAAATCCCGTCTCCACAAAAAATACAAAAATTAGCTGGGCATGGTG |
| | GCTTGCACCTGTAGTCTCAGCTACTTGGGAAGGCTGAGGCAGGAGAATCACTTGAACCCGG |
| | AGGCAGAGGTTGCAGTGAGCCAAGATCACGCCACCGCACTCCAGCCTGGGCGACAGAGCA |
| | AGATTCCATCTCAAAAAAAAAAAAAAAAATGGTGTGAGCTCTGTAGCTTAGTAGGTTGCTT |
| | CCATGGCAGATGGGAAAATATCGAGTCATCCATTTTGATTTTAAAAAAGCAAGGCAC |
| SEQ ID NO: 608 | AGGCCACGCGGGCATTGAAATCACGACTGGTGTGTGGACCAATCCCAGGATCCTAAAAAAG |
| | CGAAAGGGGCGGGTTTATGCAAAACAAACTGAGCAGGGAGCAGGCGGCGGAAGAAGTAGA |
| | GGACGTTTAAATAGGGCTGTTTCCAAAATATAGCCACTACTATAAAGAAAGAATAATGAAA |
| | ACTGTGTTTCGGAATTATAATGTATTGGGAGATAATTTAACATTTAGTGCCTGGATAGTTAC |
| | CATAACTGGTTGGAAGATGGGAAGGATAAGGCCGCCGAGGCGACCGAAGTAAAGGT |
| SEQ ID NO: 609 | AGAAATAAGTAAAACATAAGCGTGTTAGATGGTGATGAGGACTTGGAGTAATCAAGGGAA |
| | CTAAGCCATCCTCTGAGGGAAGATCATGCCGGCCAGAAAGTACAAGTCAAAGAGTGCTGGG |
| | GCAGAAGCAAATCTGGTTCAAGGAAGAGTCAAGAGCCAGTATGGGCCAGGCCCGGTGGCT |
| | CACGCCTGTAATCCCAGCACTTTGGGAGGCTGAGGCGGGCGGATCACCTGAGGTCAAGAGT |
| | TCGAGACCAGTCTGACCAACATGGTAAAACCCTGTCTCTACTAAAACTACAAAACATT |
| SEQ ID NO: 610 | TAATACTAGAATAGTATATCCAGTGAAAATATCCTTCAAACATAAAGGAGAAACAACGAAT |
| | TCCCCAGACAAACAAAAGCTGAGGGAGTTCATCAACACCAGACCTGTCCTACCAGAAATGC |
| | AAACGAGAGTTCTTCAATCTGAAAGAAAAGAATGCTAATGAGCAATAAGAAGTCATCTGAA |
| | GATATAAAACTCACTGGTAATAGTAAGTACACAGAAAAGCACAGAATATTATAACACTGTA |
| | ATTTTGGTATGTAAACTGCTCGTATCTGCAGTAGAAAGACTAAAAGACGAACCTGT |
| SEQ ID NO: 611 | TGGTTCCTGCCTTAACTGATGACATTCCACCACAAAAGAAGTGAAAATGGCCTGTTCCTGCC |
| | TTAACTGATGACATTCTCTTGTGAAATTCCTTCTCCTGGCTCATCCTGGCTCAAAAGCCCCTA |
| | AAACGGCCCCACCCCTATCTCCTTTCGCTGACTCTCTTTTCGGACTCAGTCCGCCTGCACCCA |
| | GGTGATTAAAAGCTTTATTGCTCACACAAAGCCTGTTTGGTGGTCTCTTCACACGGACATGA |
| | ATGAAACAAAACTCTTGGCATCCAAATTAAGCCATCAAAGCCTCAGCTTC |
| SEQ ID NO: 612 | CTTTATATGGTTACTTTAGGGGCACATATTATGATATATCAAAATCAATGTAAATAAGTCAT |
| | GTTTGAACAGAGCCGTAGTCTGCAAGAATGAAGAAATCACTAATAGAATTTCCTTCCTTGTT |
| | CTAAGAAAACATTTAGACAAGAGGAGTTCCCAACAAATGGACTGTGACATTGGCGCAGAAG |
| | TGGAAAAGTGAACTGCCTAAAAAAGGACCAGCTGAATGAGGAACAGGGAGGAGGCAATAT |
| | AGAGGTAAAAAAAAAAAAACAAAAAAAAAACAAAAAAAAAAAACAGAAACAAAAG |
| SEQ ID NO: 613 | CAGAATGGACTTGGAGAATCTTTTGTATCAGAAAGTAAAGTTCTCAAAGAATGATAGGGAC |
| | ATGTTATAAGGACACAGGAACCAGCATAACGGGGCCCCCACTGGCCAAATGCAGACAATGT |
| | GTACATAGTAAGACAAATGAATGTAGATACCATCTTAGCCAGGTGATGAAACAAACTGGTA |
| | TCGCACTACTCCTGCTATGATGCAGTGAGAACCCTTCTGTGATACTCCCCTCAAAAATGAAT |
| | AAATCAAAAGGATCACAGAAAAACACAAATTGCAAGGCATTCTATAAAGGAACTG |
| SEQ ID NO: 614 | ATCTGCCTCACCCCACGGAGGAAAACTGAGTCCAGGAGACAATCCCCCCCTAAATTTACCA |
| | ACTGTTTCCCCCCTTCCAGAAGTTTCTTGAGAGCAGGAGCCATATGGATTCGTCTCTGCATG |
| | CCCAGCCTGAGACATCAGTGCCTAGGACTCAGGAGGCATACCCAGCACATGCTTGTAGAAG |
| | AAAGAAAGAAACAGGGAAGGTGTTTTTTGCTATTTATCGCATATTTAATTTCATCTTTATTAT |
| | ATTTTTCCTGATTGTAACAGGATGATGTCTTAGGTGTGAAAAATTAGAAGTGG |
| SEQ ID NO: 615 | ATTTTTAAAATGTATGCTTCACACAACACCAATAAACATCTAAGAGATGTGATATAATCCAA |
| | GGCAAAGAAAAGTAAGAATCAGTTAATGTCTATTTTATCTGCACAGCATTACGAACAGAAA |
| | ATTGTAATAAAAAAAGGTTTAACCAAACTGAAAAAAAGAGAGACAAAATCTTGGTTTTAAT |
| | TTGAAAAGATGATTGGGAGTGATCTCAGAAGAGAGTTCAGCAGGAAGCAAGGAAGAGGCT |
| | GTTGACCTTGAGTGCAGCCTCAAGAATGGAACCTTTTTGAAATATTTTAAAGGAAA |
| SEQ ID NO: 616 | TCCTGGAAGTGGGAATTGTACTTTTACTTTTTACTTTGTATAATAAATTATTCTTTTTAAACG |
| | GTGGGAGTATGAATGGTAACTTTTAACATTTTTCTTTTGTGTTTTTTACTGCCAAATATGCTA |
| | AACAATGAATCTAAGTGGTAAAGCTATGTGGTCTTCCAGCTATAAAATGCATATTTACATGA |
| | AAAATCTCAGATAACAGGAGGCAAAGATTCTTGTTCAGATTATTTATTTCATGCAACTGAAA |
| | ATGTTTCTTCTTATAGTCTCTCATAATCCACATTTAAAGTATTACATATA |
| SEQ ID NO: 617 | TCACATTGTATTAGGTATTATAACTAACCTTGAACATATATAGACTTTTTCTCTTATTATTAT |
| | ATTGTATTATTATGATATAATATAACAACAATTTACATAGCATTCACATTGTATTAGGTATTA |
| | TAACTAATCTAGAGATTATTTAAAGTGTACAGGAGGATGTGCACAGGTTATATGCAAATAC |
| | TATGCCATTTTATATCAGGGACTTGAGCATTTATGGATTTTGGTATCTAAGAGAGGTCCTGG |
| | AGCCAAGCCCTCACAGATACTGAGGGACAACTGTATTTAGAATAAATGTTT |
| SEQ ID NO: 618 | TTTTTTTCACCTTAAAAATATTAATGTGGGGCTTACAAACTCATAAATCAGTTACTGGTCAA |
| | ATTTAAAAAAAAAATGACGTGCCTTGGCTAGTGCAAACAGTAAATCAGTTTTTTTACTGTGT |
| | TTGTTTGATTCGCTTGGAATCTAACAAACATTCTGTAAGAAGTTACCACCGAAGACAGGAG |
| | AAACAGATACCTGGCACTTCCTTCCTTACTAATGAAATGTTATGCATTTCAGTACTTTCTACG |
| | TGAGGAAAAGCAATATTGCATAAGAGTAATTAAAGTGTTCACAATTAGGTCC |
| SEQ ID NO: 619 | AGCCTGAGCAATATAGCAAGACCCTCACCTCTTAAAAAAAAAAAAAGTAGATTAAAAAAAT |
| | ACCACAATTGCTCAGGTAGATTGAAAAACAGGCATATAGTACTTATGGTACAGGACCAGCA |
| | TGCATGCATGCATGCATTGATTGATTGATTGATTGATTGATTGAGACAGGGTCTCTCTCTGT |
| | CTCCCAGGCTGGAGTGCCTGGCCTTAAGTGATCTGCCCACCTTTGCTTCCCAAAGTGCTGAG |
| | ATTACAGGTGTGAGCCACCATGTCAGCTGGCGAGGCTTTTTAAAAGATAGTTCC |
| SEQ ID NO: 620 | CATCTTGCTGTGTCCTCACATGTCAGGGAGATAGCTTTCTAGCTCTCTTATTTACTTTTATAA |
| | AAGGAATTCCATCAGGAGGATTCCACCCTCATGACCTCATCTAAACCTAATTACCATCCAAA |
| | GGCCCCATCTCAAAATACCATCACATCATAAGTTAGAGTTTCAACATGTGAATTTTGAGGGG |
| | ACACAAACATTCGGTTGTTGGCAACTGTAAAGTTGGAGCAACCCCCATACAGAATTCTTGGT |
| | CTCTGTGGTAAAAGATATTATAGTACAAAAGCCAAGCCTCTGAACTTAAGT |
| SEQ ID NO: 621 | CTTTTACTGTCTCGTATCTGGAATCACCATTTTGCCAAGAAACGCTGGTTTCTTTCAGTGGGG |
| | AGTAGTATTTGGAAACCAAAGTCTGGGTGTTTAGAATGCTCACAGTCCTAGGATGTCCTTGT |
| | TTCCAGGCCCTTTGAGTAGACAGCATTAAAAAATACATGTATTTCAACAGTTGACTTCATAT |
| | TGATATCTCCAATTCAAATTTAACATTACAAGGTTTTTCTTCAATTTAATTTATATTTATTGC |
| | CTTACATTAACAATTATGGCTGTTAATAAATAACATTTATTCTATATCCC |
| SEQ ID NO: 622 | ATACCCTGCTCATGGGCTGAACCATTCAAAGTAACTTCTCACATTATAACTTTAACGTTTTA |
| | ACGGCTTGACATGACATTAACACTATGTATTTTCTTATATCATTCTTATGAGACAAGAAGAA |
| | TCAGTCAATTAAATATTTAATGAACATCTGTTAAGTTCAAGGTAGTACTCTAATTTGTAGAA |
| | ACATACAATTTACCAAGACTGAATCACAAAGACACAGAAAATCTGAACAGACCAATTATGA |
| | GTAAGGAGATTGATCCAGTAACCAAAAACTTCCCAATAGAGAAAAACCCAGCA |
| SEQ ID NO: 623 | ATCCAGTCACCTCCCTTCAGGCCCCTCCTTCAACACTGAGGATCACAATTTGACATGAGATT |
| | TGGGCAGGAACACAAATCCAAACAGTATCGCCATGAACAAACAAGGCTAACTCTCAATTTT |
| | CTGGAAGAGTTTCTAATCTGTTTAGGGCATGGACTGTTCTTGGCCAGAGGTTAGGCAGTCAT |
| | GATTTACCCCTTCTTCTGGTAAAAGAAGGAAAGCAACAGTACATATATTATGGTACTACCAG |
| | GGAAGGAAACGTAAGTGAGAAAGCAATAAAATTTCATGAATAGTAAGCATATC |
| SEQ ID NO: 624 | AACGTTTGATTGTTCCTTTAAAAATTCCATTAGTCTCACTTTTCAGGAATTTGTCTCCAGCTT |
| | CCTAACATTTCCTAAAATTGTTCCCTGGAAGTAAAAGTACTGCTTCTTTTCGAAATGACCAC |
| | TTATTTGAGTACTTCCTTGCTCCAACAATGTCCATCCGCAGTGTCCTCAGATGTCACCCAAA |
| | CTATTCTGAAGACAAGGTTAATTTTAAGGGGATTTCAGAGTCAATCATATAAACAGTTTAAA |
| | AGTGGGATAGAATGGAGGGAAAGTGCAAGCACTGAGTGTATTAGATACCTA |
| SEQ ID NO: 625 | CAAAACATTTAAAAAAGAGATTCAAATGAGAATAGCAAAAGCTAATAAAGTGTTAAGGTG |
| | ACAAAAAACTACTCATACAGAATAATCTACTACTATGATGGAGGTTTTATAGATGCAAGAT |
| | ACATATTCACACATATATTTAACATTTTTCCCTTTGGTAGGTAGAAGATGAAGTAGAATACC |
| | AACATAAGAGCAATATGACTGGTTTCCAGTCTTTGATCTGCCACTAGTTTGTGACCATAGGA |
| | AAACCATCTTAACTTTTTTTCTGAACCTCTGTTGTTTTCATTTAAAAGAATGGAG |
| SEQ ID NO: 626 | CCAGCCTGTGATAGAGTAATTATGTTGCTAGATCCAAAGTAAACAAAAAGTTTCCCATAAG |
| | GCTTGGTATTGCTTACAAGTTACAGTGAATTCTAGGAAGACTATTATAAATTATAATTTAAT |
| | TTATATATATATTTAGAATTTTCATGTGTTTATACTCTAAGAGCCATCTGAATAGGAATTTGC |
| | TTGGGGCTGTCAAAAAGTGAAGTATTTTCTTGGAACAGTGAAATATCAGAAAAAATTATCTT |
| | CATTTGTCTGGAAAGCAGCATTAAGGGGGCTCTTATATTACATGAAAATATA |
| SEQ ID NO: 627 | CTGGGTTTGAGTATCTGAGGAAAGCTGTTTTAGAGCAGAGCAGAGACTCAAAGCATTGGTT |
| | CTCATTCATTACTAGTCTTCTGATTTTGAATCAGGCACATGGCTTCTCTAAGCCTCAGTTTGC |
| | TAATCTGTAAACAGGAGAGTAATAGTACTTGCCTCTCAGGTTCTTTTTTTTCTTTTGTCAAAA |
| | GCATTTTATAAGCTACAAAGGGGTCTAGAAATGTAGTTTATTACAATCGTTGTTACTTACAG |
| | GTCTGAATTTCCTGCAGGAAAAGGGGATAGAAAAGTATAAGAAATAATGGT |
| SEQ ID NO: 628 | AGGATAATGACCAAGAGACGGTTCTGGTCCTCAAGCTTAGTGATGGGGTTCAGGGAGGCAG |
| | CCAGTTTAGCACAGGAGACAAACATATAAACAGATAATTATAATCAAACGTTATGGGTTTG |
| | GCATTAGAGGTATAGTGGGAAGAGTGATCAACTCCATGTGAGGGAAAAGGCAAAACTGCA |
| | GGGAGTGGGGGGGGGGCGTCTGTTAAGTAGGGTTCTAAAAGCTGAATAGGAGTTTGCCTGG |
| | CAAACATGGAATGGGAGTGGGCAGAGTGATACTCCAGGGAGAGAAAATAGCAGGTGG |
| SEQ ID NO: 629 | TGACTGTTGTTTTTTACATAAGCCAAAGTTTAGAAGGTGGACTCAAGGATGGACCAGATCA |
| | GGATGGGCCAGGTCATGCTGTGATCACAGACAACCCCAAAATCTCCTGACTTATGACACCA |
| | AAGATGGACTTGCTGTTCCCACTTCATGCCCATCACAGGGTATATTCTTTGGCTCCATGCGG |
| | CCTTCATTCTGGGACACAGGCTGCTAGTACAGCTGCTGCCTGGGGCAATTATCAGTCATTGT |
| | GGCAGAGGGAAAAGAGGTCATGGTGAAGCTCACATTGGCTCCTGACGCTGCCAG |
| SEQ ID NO: 630 | AAAATACGTTTTTTTTTTCAGTAGGTGGATCAACCTCAAATTTTAATATAAAGCATTACTTAA |
| | AGGAGAATATGGGGACATTCATGACATTTCTTATATGTACATAAAACTTCATGAAAATAATT |
| | TAATGCTATCCAGCAGTTTATTTTAGAAGTACTGGAGGCTAGGCATGGTGTCTTATGCCTGT |
| | AATCCCAGCACTTTGGGAGGCTGAGGTAGGAGGATCACTTGAGTTCAGGAGCTGGAGACCA |
| | GCTTGGGCAATATAGTGCGACCCCATCTCTACAAAAGAGAAAAGAAGTACTG |
| SEQ ID NO: 631 | GCTTTCCCACTGCTCACTCTCCTCGCTCAAAATTCAAGTCTCAACCGAGTCATCTCTGTGACG |
| | TCACGTTGATTTGCATAAGATTCCCCAGCGTCCCAAGCGAATATTCTTATGGTTTTCAAAAC |
| | CTGAATGTTTGACACGGGATGTTCCAACAACAAGAAACCTCCTATGCAGATGGGCCTTAAA |
| | TACGGCTGGTGGAGTGGGAACACGTCGTATACACGGACACACGGGCAGGCACTCACCCTCA |
| | ATGTAATGGTAGTCATCATCCGTGGGGGAGCGGGGCGCGAACAGAACCTTTCC |
| SEQ ID NO: 632 | GAGCCAAGTGAACAGAACCCTGATTTTGATCCCTTTTCTCTCAAAAGCCCTTCGCAGTCTCT |
| | GAATTAAGTCTATTAGCATGTTCCTCCCATAGTGCTTTGCTTCATATCAACAAAAACCTAGC |
| | TAAGTGAAATCAGCAACGATATGCAGAAACCACCTACGCAGGTCACAAACATCTTTCTATG |
| | ATTGTATAATTTTCAAGCAAGCAATAAGTGAAGATTTTTCCATAGGCCCTAAACTCACCTTT |
| | GCGAAATAGGAAGCTGGTTTATTGGGAGTGATGAGCAGGGGGCGTAACAAATT |
| SEQ ID NO: 633 | TTAAAAACTTTGAGACATGAGGCAGGAAAATATGACTGACAAAAGGAATAGGCAGATAAT |
| | TGATAAAGATGCACAGATGATCCAGATGATGTTAGCAAACAAGTAATATTACAAATAACTA |
| | TCATAATATATAACTATGTAAATATTTAAAATACAGAGAAGTTGTATACAGTGAATAAAAG |
| | GAGAACTGGAATTAAAAAAAAAAAAAAACAAGGAGACATTTAGAAACAAACAACTGATCC |
| | CTGAAATGAGCATCAACGGGACAATGGCCAATACAAGTCTGTTAAGGATGTGGAGCAA |
| SEQ ID NO: 634 | TCACTCTGTGCCTAGGCTGGAGTGCAGTGGGGTGATCTCAGCTCATTACAACCTCCGCCTCG |
| | CGGGTTCAAGCAATGCGCCATGCCTCAGCCTCCCGAGGAGCTGGGATTACAGGCATGCACC |
| | ACCACGCCCGGCTAATTTTTTTGTATTTTTAATAGAGACGGGGTTTCTCCATGATGGTCAGG |
| | CTGGTCTAGAACTCCTGACCTCAGGTGATCCGCCCGCCTCGGCCACCTGGTAAGACTGCTGT |
| | TAACATGTTGGTATAAAACTGCACAACTTTTTTCTAATTACAAAAATAGATAA |
| SEQ ID NO: 635 | ATGTAGAATTGCAGCACAAGATCAATCTGCAGGTAGACATATATTTTTCCATGGTTCTTCGC |
| | AAGGCATGCTGAGCATCTTTGGTGAGTTTGTCAACTTCTGTCAATAATACCACTGAGTCAAA |
| | GAGAAACAAAACAAACTTTAACTTGAGTTCACTCAAACTTTAACTTGTCTCTTTCTTCCTTCT |
| | CATTATCCAGGATGAAATCCTAAATAATAAGCCTGATATACTACTCTTCCCATTGGCAAAGA |
| | TAAAGTTATAAGTATGGTAAAATTACTTTATTATTTTAAAATGCTACAATC |
| SEQ ID NO: 636 | CTGGGGGAGGAGCATTTCAGAAAGAGGAAACATAAAACAGCATTCCTAGGGTTAGAAGGA |
| | GCCTATAGGGTTCAATAACTTGCAGTGTGGTTGGGGCTTATGGATGCTGGATGAAGATAAG |
| | TGAGAGAGGTTTACAGGGACAGCATCATGTCAGGCCTTGAGGGCAAGGTAAGGAGTCTGGA |
| | TTTTATTCCAGATTTGATGGGAAGCCTTTGGGGGATTTCGATTAGGGCAATGACATGATCTG |
| | ATTTAGGTTTATAAAAGATCTCTTGAATACCTCTTGATTATAAATGGGCAAGAGTA |
| SEQ ID NO: 637 | ATTCTTTGAGATATACATTTAATATGTTTGATATGATTTTGGCTGTTAAATTGTATGATGTGT |
| | CTTCATTTTATGAACCATTAAAAAAGAAAAAAACATGCTATAAATATAACTGAAAGAAGCC |
| | ATTTGTTGCAAGATATTCTGATGTCAGAGATCTTATGAAATTTGAACACATTTTAGAACTGC |
| | AAAAATACAGTTAAGTAGAATAGTCAATGAAAAAAAGAAATCTATTTGCATATATAAATGT |
| | CCTATGAAATTTGATTTTCCAGTGAACACTTTACAAAAACAAATAAAGAATAT |
| SEQ ID NO: 638 | ACGTGTATTGTTGTTAATATGGACACATGACATATTTGTCTGCCTGACTTTTGATCCCAGCTA |
| | CAACCTCTGGCCTTTTCAAATGATTCTTTAATATCACATAAAGGGAGGTGAGATAACTAAAG |
| | GGGGTGATTCCGGACTAGGAGGCAAGGGAGGGCAGATAACATGGTGCTTTGAAATCTTCTG |
| | TGACTTTTCAGTCACTTATTTCATTAAGTGATATATCTCACTAGAAGTGAGGTAGAACATAA |
| | CAAATCCATGTTTGCTGGGCATATGTTATGACAACAGAGAAATTCACAGACT |
| SEQ ID NO: 639 | GACCATTTCATAATGATAAAGGGCTTATCTCACCAAGAAGGCAGTCACACTTACGTTTTTAT |
| | GTATTTGTTGAAGAGTCCCAATGTATTTAAAGCAAAAATAAGCAACTACAAAGAGAAAGAT |
| | ACAAATCCATGATCAAAGTGAGGAATTTTCACACACATCGTAGTAACTGATGGAATGAGTC |
| | AATGAAAAATTAGTGAGGAAATAGAAGATTTGGACAGCACAACAAATGGCCTAGGAGAAC |
| | ATTTAGAATGTTGCCTTCGATGCTTAAGAATACATATTCTTTTCAAAAGAAAACAC |
| SEQ ID NO: 640 | TCTCGATCTCTTGACCTCGTGATCCGCCCACCTCGGCCTCCCAAAGTGTTGGGATTACAGGC |
| | GTGAGCCACTGCGCCCAGCCAAGATCCCAGTTTTTAATAAAAAACTTTTCTCATAGATAAAC |
| | TTGAAATAATTTTGAGGACAAGGTAAAACTGTCATTTGTTTTCCATGCTGCCTAGGAGGCTT |
| | GTAGTATTTATTGAATACAAGTGGAATTCATTTGACGTATGCATCAGAATTAGTTTAAAAAT |
| | TGGGATTGTCTTTCTTAGACAAATTCAGAGGTCATCCAAAGATAAAGGAGAG |
| SEQ ID NO: 641 | ACTGCAACCTCCACCTCCCAGGTTCAGGCGATTATCCTGCCTCAGCCTCCTGAGTAGCTAGG |
| | ATTACAGCCCAGCTAATTTTTTGTATTTTTAGTAGAGATGGGGTTTTGCCATGTTGGCCAAG |
| | CTGGTCTTGAACTCGTGACCTCAGGTGATCCACCTGCCTCGGCCTCCCAAAGTGCTGGGATT |
| | ACAGGTGTGAGCCACTGCACCCAGCCTCCCTGATTATTTTTTAATTAAAAAATTAATGCAAA |
| | TATCATGAACAATAAAGAAAGACTAAGAAACTCTCTTAGAAGGAAACTAAGG |
| SEQ ID NO: 642 | AGGAGGATATATAACTCATGTCTATAAGGCCTTGAGGTCCTGTGCTAGATGGCATGCTATGT |
| | TTTGATCAGATTTAATTGAGAACTAGCTCTGATATTTTATTTATGTATTTATTTATTTATTGTA |
| | GAGATGCGTAGTCTTGCCATCTTGCCCAGGCTGGTCTTGAACTCCTGGGCTCAAGCAATCCT |
| | CCCACTTCAGCCTCCCAAAGTGCTGGGATTATAGGTGTGAGGCCCCATGCCTGGCCCTACAT |
| | ATTCTAAAATAAGAAAAGGTGTTCTGCTATTTAGAAATGACTGCCAAATC |
| SEQ ID NO: 643 | CTCAGCCTCCCAAAGTGCTGGATTACAGGCGTGAGCCACCGCGCCTGGCCTAATTTTGTATT |
| | TTTAGTAGAGACAGGGTTTTTCCATGTTGGTCAGGCTGGTCTCGAACTCCTGACCTCAGGTG |
| | ATCCGCCTGCCTGGGCCTCCCAAAGTGCTGGGATTACAGGCGTGAGCCACTATGCCCAGCC |
| | CCTAGTCAGCAATTTTCTTATCGGGCATAATTTAGATGCTTATAAACCCAAGGGGTATACCC |
| | ATCCTTAGAACTACAAAGACCCATCACACCTGCTGTCTAAATGTTTCCACATA |
| SEQ ID NO: 644 | GAGTCTTAAGAAGCTGACATTTTAAAAACAAAAAACTCAAGTTGTTATTATAGTATTGTGAC |
| | ACTTCTGCATAATTTCCTAACAAAGACCAGCATTCATAGTGCTGAGGAACAGACTTTTCCAG |
| | GCATTTTACTGAATAAGCTGTAAAATGCTGCCTTTGACTTTGCTGGTGGCCTGCTTGGCATA |
| | GCTTCTCTGGGCCTCTGCTTAACTTTCCCAGACAGCACAGCACTTTGAAACACTCTCCCCAC |
| | TGAATACAACTAACAAGTTCTTGATAAATCTCTACTATCAAAACTTATTTGG |
| SEQ ID NO: 645 | AGGATTCCTGGGGCCACCATAACAAAGCACCACAAACTGAGTGACTTAAAACAGTAGCAGT |
| | TTCTTCCCTCCCAGTTGTGGAGCCCAGAGTCTGAAGTCAAGAAGTCCTCAGGGCCACACTCC |
| | TCCTCCTCCTCAGGATAGAGGGGAGAATCCTTCCTCTTCTAGTTTCTGGTGGCTCCTGGCATT |
| | TCTTGGCTTATGGCAGTTTGACTCCAGTCTCTGCCTGTGTCTTCACGTAGCCTTTTTCAATGT |
| | CCCTCTGTGTCTATATCCAAATCTCCGTCTCTTTCATGAAGACACCATTTT |
| SEQ ID NO: 646 | ACTCTCAGAACCTTGGTTAACCTCAAGAAACATTCCAGTTCCCTATCAGATAGGAATCCAAG |
| | ACTCCCTCTGTGGACACCAGGCACCATGAAATCCAAGTCTGGCAATCCAGAGGTGAGACCA |
| | CAGTTTCAGTTTCTAGGGTCTAAATTGATTAATGCAAATGTAATCCATTTACAGTATAATCC |
| | CAGGTTCATTGCCCTGTGGTAATTCAAACAATGTGAGCATTCAAGGCACAGAAATAACAAA |
| | AAGGCTTTTTTTAACTTCTAGTTATTTTTAAACATTTTTTTTTAATCATCATAG |
| SEQ ID NO: 647 | CAACTACAGATGTCACTGAATTCCCATTACCTAGAACCGTGCCTGACAAACAAAAGATACT |
| | TGAAAAAATTAACAAACAACCCTACAAGGTATGTCATATAACCATTTGCCAAGAGAAAAGA |
| | GAAGATTAGATTTCAGAGACAAATAACTTACCTAAAGCTGCATAGTAAATAAATAGCAAAT |
| | GCACCTGAAAGAGCCAGCACTCTACCCACTGACTCACTACAACTTGCGACATAAAGCATAT |
| | ATGCTAAGAAACAAAAACGCAAAAGCAAGCATTTCTACATGAAAACACCAGATCAC |
| SEQ ID NO: 648 | GACTTGCTCTTAGCTGCTTTGTGAAACTGAGGATGTGCATTAGGTGTGGAGTCAATCTGCTC |
| | TCTTTGAAATGAGATTCAGAACAAAAAAACAACTAAAACCTAGCAAAAAACCAACCACCA |
| | ACCAACGAACTGCCTGGGAGTTCAGCTATCTGCCTGTCTGATCTCAGGTCTGAAAGCCAGAC |
| | CATCACCCCTGGCTCTCTCTCTCCCAACAGACACTGCTGGAGAGTATCTGAATCCAGACCTT |
| | TTGGAAAACAACATAAAGAGATATTAAATATTTTGACCTCAAGAAATCCCAACT |
| SEQ ID NO: 649 | TGCTAGGTCATATGGTAACTTTGGAGAAACACCATTTTATGCTCCTCCTGGCAATGTATAGG |
| | GGTTCCAATTTCTTCACATTTTTGCTAATACTTGTAATTGTCTGTCTTTCATATTTTTGTCATT |
| | CTCGTGAGTGTGAAGTGGTATCTCATTGTGGTTTTGATTTGCATTTCCCTAATGACTAATGGT |
| | GTTGAATATCTTTTCATATGCTTATAAGCCATTTATATGTCTTTGGAGAAATTCTTTTCAAAT |
| | CTCTTGCTCATTTTAAAATTAGGTTGTCATTTTATTACGGAGTTGCAT |
| SEQ ID NO: 650 | ATATTGATCCAAGTGAGATTTCAATGTGGAAGAGAGGGTCCTACAGCTGAAGAAAACTGGG |
| | GAGTCACTCTTCCAGAGCAAGCTCTTCCAGCACCTCCTCTGCCTTCCCATAGTCCACAGGCT |
| | GCCTCCGGATCTCTACCATAGCAGTGAACCTAGTGAATTACCGTGACTCATTTCTCTGTCAA |
| | TTTTCCCCCTAAACCATGAGTTCCTCAAGGAAAGGACCATGTTGGATTTGTTGCTGTATCTCT |
| | GGCTCCCAGCACAAAGGAGGCGGTTGTGCATGTGAGATGAAGGAGGGAGAAC |
| SEQ ID NO: 651 | TGGCTGGGAGATGACCCAGGTGGGTCTCTATAGGGTGGCATGGCAGCGAGCACAGACATGG |
| | CTGGGCTGGAGGAGAGCTTCCGCAAGTTTGCCATCCATGGTGACCCCAAGGCCAGTGGGCA |
| | AGAGATGAATGGCAAGAACTGGGCCAAGCTGTGCAAGGACTGCAAGGTGGCTGACGGAAA |
| | GTCCGTGACAGGGACCGATGTGGACATCGTCTTCTCCAAAGTCAAGTGAGCCCTAAGCAGC |
| | CCCTGCTTCTCATGTTCCCAGGAGGTGGGGAACTGGGGGGCTGGAACCAGGGAGGAC |
| SEQ ID NO: 652 | ATTGTTCATGTTGTATGCAGAAGCAGAATGTCAGAACTACTCTCGCCATTCTCCTGCCTCAG |
| | CCTCTCCAGTAGCTGGGACTACAGGTGCCCACCACCATGCCTGGCTAATTTTTTGTATTTTTA |
| | GTAGAGATAGAGTTTCACCGTGTTAGCCAGGATGGGTGAACCCAGGAGGCAGAGCTTGCAG |
| | TGAGGCAAGATAGCGCCACTGCACTCCAGCCTGGGCGACAGAGTGAGACTCTCTCTCAAAA |
| | AAATAAATAAATAAAAGAACTAAGTACTTTCTGCCTGATGAAACTCAGAGTTG |
| SEQ ID NO: 653 | TGCCCAAGGTCACAGACTGGAAGATAGTAAGATGTGAACTCAAGAAACTGGGATCAGAGC |
| | CCACACTCTCACCCAATACCCTACGCAGTCTCCCTTGAAAAGATAAGGCTGTTCTTAACTAC |
| | ATGATCTAAAGTGGCCAGTCAGTATGCAAGTGCACCATAGATCTGGAAGGGATCACAGAGA |
| | AAACGGGAAGAAAGGGATTTCTTCTGGAAAGTGGAAGTGAAAATTATATAACATTTTATTC |
| | TCCATGGAAGCTTTGTCTGAATAATGTCATATGCCTTACTACTAAGAAAGGTGCAT |
| SEQ ID NO: 654 | GAGAACTTAAATTCTATGCTTCTCTTGTTGTCAGATAGAGTTTGTCAGCTGTTTATGGTTAGG |
| | AGCTATGTGGCAACCATTGATTTTTGTAATCCCCAGCACCTAGCAAGTGCTTAATACTGTTT |
| | AGATGTTTCGTTAACAATCAATTGGTAAAATAGCATGACATAAGTACCTTTAAGTCCAAGTT |
| | ATTCTACTTTCTGCTTTGTAGACATTAAATCCATGGGTTAATAGGATTGTTTCATCCTGGTAT |
| | AGAGAAAAGACAAATTTAAGGTGTCTTTGCTTGTCTTAAAAACCAAGTTT |
| SEQ ID NO: 655 | AGCTGCTTTGCTAGCGTGCAGATGGAGAAGGCGGGCCCGGGAGGCTTGGAGTTTGGCCCAG |
| | GAGCTGGCAGGTGCCCAGCAGCAGTTTCACTGCCCGCTTCAGGCGACTCTCCACTGGCTTCC |
| | TGGGAGCCTTCCGTTAGGAGATGCTCTCTCAAGATCCCCGTCACCAGGGCTTTCTGGTTGGA |
| | ATGAGGCAAGGACCTGCTTTACACGGTGCGCCCCATTACCCAACAGCGTTTCCTGTCCTTGC |
| | TGGCCACAGCCATCACAGTGGGGCTGTCATCAGCCACTTTAAACAGGCAAAAC |
| SEQ ID NO: 656 | ATGAACTGATAATATACTACAGCTACAAAAAAAAGGTGGCGGGGGGGAGGATAGTGATAA |
| | AGAGCTAAAAGCACCTTTGTGTGAAAAATAAATTATCAGAAGAGTATTTGCCAAACGCCTA |
| | GCTACTATCACTCTGATTAGCACACAATTCGGTTAGGCATTTTCTGAGGAAAATTCCTATGC |
| | CCAAAGATCTTTAAATGAGTCACGATTCTCATCTGAAAAAAAAAAAAATTAGAATGCTGAC |
| | AACACTAAGGTAAATTCAACTTCATAAAAGCATTTCTTAAAAACTGTGTTTCTAAA |
| SEQ ID NO: 657 | TACAAAAATTAGCCGGGCATGATGGCGGGTGCCTGTAATCCTACCTACTCGGGAGGCTGAG |
| | GCAGGAGAATTGCTTTAACCGGGGAGGTGGAGGTTGTAGTGAGCCGAGATCACGCCATTGC |
| | ACTCTAGCCTGGGCGACAGAGTGGGACTCCATCTCAAAAAGAAAAAAAAAGGAAAAAAAA |
| | GAAACCTCAGCAGAGGAGGAAAAACTGTAAAAAAAAGAAAAAAAAAGAATTTTGTGCATA |
| | GAAATTGAAAATTTGGAAATGAAAATTTCAGACTAAAAATTAAAATGTCAAAGAAATC |
| SEQ ID NO: 658 | GCCCCGGCTCCCCCAGGCAGAGGCGGCCCCGGGGGCGGAGTCAACGGCGGAGGCCACGCC |
| | CTCTGTGAAAGGGCGGGGCATGCAAATTCGAAATGAAAGCCCGGGAACGCCGGAAGAAGC |
| | ACGGGTGTAAGATTTCCCTTTTCAAAGGCAGAGAATAAGAAATCAGCCCGAGAGTGTAAGG |
| | GCGTCAATAGCGCTGTGGACGAGACAGAGGGAATGGGGCAAGGAGCGAGGCTGGGGCTCT |
| | CACCGCGACTTGAATGTGGATGAGAGTGGGACGGTGACGGCGGGCGCGAAGGCGAGCGC |
| SEQ ID NO: 659 | CTTTCAGTTTGCTGAGAATGAGGCCTTCCAGCATCATCCACGTCCCGCAGAGCGCCCTCTGT |
| | GAAAGGGCGGGGCATGCAAATTGGAAATGAAAGCCCGGGAACGCCGGAAGAAGCGCGGGT |
| | GTAAGATTTCCCTTTTCAAAAGGCGGAAGAATAAGGAAATCAGCCCGAGAGTGTAAGGGCG |
| | TCAATAGCGCTGTGGACGAGACAGAGGGAATGGGGCAAAGGAGCGAGGCTGGGGCTCTCA |
| | CCGCGACTTGAATGTGGATGAGAGTGGGACGGTGACGGCGGGCGCGAAGGCGAGCGC |
| SEQ ID NO: 660 | CGGCTCCCCCAGGCAGAAGGCGGCCCCGGGGGGCGGAGTCAACGGCGGAGGCCACGCCCT |
| | CTGTGAAAGGGGCGGGGGCATGCAAATTGGAAATGAAAGCCCGGGAACGCCGGAAGAAGC |
| | ACGGGTGTAAGATTTCCCTTTTCAAAGGCGGAGAATAAGAAATCAGCCCGAGAGTGTAAGG |
| | GCGTCAATAGCGCTGTGGACGAGACAGAGGGAATGGGGCAAGGAGCGAGGCTGGGGCTCT |
| | CACCGCGACTTGAATGTGGATGAGAGTGGGACGGTGACGGCGGGCGCGAAGGCGAGCGC |
| SEQ ID NO: 661 | GCCCCGGCTCCCCCAGGCAGAGGCGGCCCCGGGGGCGGAGTCAACGGCGGAGGCCACGCC |
| | CTCTGTGAAAGGGCGGGGCATGCAAATTCGAAATGAAAGCCCGGGAACGCCGGAAGAAGC |
| | ACGGGTGTAAGATTTCCCTTTTCAAAGGCGGAGAATAAGAAATCAGCCCGAGAGTGTAAGG |
| | GCGTCAATAGCGCTGTGGACGAGACAGAGGGAATGGGGCAAGGAGCGAGGCTGGGGCTCT |
| | CACCGCGACTTGAATGTGGATGAGAGTGGGACGGTGACGGCGGGCGCGAAGGCGAGCGC |
| SEQ ID NO: 662 | ACAAAACCCTCTGCCGGGCTCTTTGGGGGCGGAGTCAACGGCGGAGGCCCACCGCCCTCTG |
| | TGAAAGGGCGGGGGCATGCAAATTCGAAAATGAAAGCCCCGGGAACGCCGGAAGAAGCAC |
| | GGGTGTAAGATTTCCCTTTTCAAAAGGCGGAGAATAAGAAATCAGCCCGAGAGTGTAAGGG |
| | CGTCAATAGCGCTGTGGACGAGACAGAGGGAATGGGGCAAGGAGCGAGGCTGGGGCTCTC |
| | ACCGCGACTTGAATGTGGATGAGAGTGGGACGGTGACGGCGGGCGCGAAGGCGAGCGC |
| SEQ ID NO: 663 | GAGCCCCGGCTCCCCCAGGCAGAGGCGGCCCCGGGGGCGGAGTCAACGGCGGAGGCCACG |
| | CCCTCTGTGAAAGGGCGGGGCATGCAAATTCGAAATGAAAGCCCGGGAACGCCGGAAGAA |
| | GCACGGGTGTAGATTTCCCTTTTCAAGGCGGAGAATAAGAAATCAGCCCGAGAGTGTAAGG |
| | GCGTCAATAGCGCTGTGGACGAGACAGAGGGAATGGGGCAAGGAGCGAGGCTGGGGCTCT |
| | CACCGCGACTTGAATGTGGATGAGAGTGGGACGGTGACGGCGGGCGCGAAGGCGAGCGC |
| SEQ ID NO: 664 | GAGCCCCGGCTCCCCCAGGCAGAGGCGCGCCCGGGGGCGGAGTCAACGCGGAGCCACGCC |
| | CTCTGTGAAAGGGCGGGGCATGCAAATTCGAAATGAAAGCCCGGGAACGCCGGAAGAAGC |
| | ACGGGTGTAAGATTTCCCTTTTCAAAGGCGGAGAATAAGAAATCAGCCCGAGAGTGTAAGG |
| | GCGTCAATAGCGCTGTGGACGAGACAGAGGGAATGGGGCAAGGAGCGAGGCTGGGGCTCT |
| | CACCGCGACTTGAATGTGGATGAGAGTGGGACGGTGACGGCGGGCGCGAAGGCGAGCGC |
| SEQ ID NO: 665 | CTCGAGCTCCTGAGTCGAGACGGGATTTCTCCGTGTTTGCCAGAATGGTCTTGATCTCCTGA |
| | CCTTGTGATCCACCCGCCTCGGCCTCCCAAAGTGTTAGGATTACTGGCGTGAGCCACTGCGC |
| | CCGGCAGATTTTTCTTTTAAAACGTGGAGAATAAGAAATCAGCCCGAGTGTGTAATGGCGT |
| | CAATATTGGTGTGGACAAGACAAAGTGAATGAGGCAAGGAGCGAGGCTGGGGCTCTCACC |
| | GCGTCTTGAATGTAGATGAGAGTGGGACGGTGATGGCAGGGAGGAAGGCGACGAC |
| SEQ ID NO: 666 | TCCATGTTGGTCAGGCTGGTCTTGAACTCCTGACCTCAGGTGATCCGCCCGCCTCGGCCTCC |
| | CAAAGTGCTGGGATTACAGGCATGAGCCACCGCGCCCAGCCAAGAAATAACAATATTTGTT |
| | ATTTTGACTTTTTTAAAATGTGTATCACCTTGTTCTTTTTCTTTCTCTCCTTGAATATTTAAAC |
| | ATCTTCACTAACTGAACTAAGAAATTGAACTAACTCAACTATAAAACCGAGAGAGGGGGGT |
| | AAGTAAATAGTCTTTTCATGGGAACATGACAGAAAAACAGAAATAAGACATC |
| SEQ ID NO: 667 | AACATGGAGAAGCCCCATCTCTACTAAAAATACAGAATTAGCTGGGTGTGATGGCGCATTC |
| | CTGGAATCCCAGCTACTTGGGCGGCTGAGGCAGGAGAACTGCTTGAATCCGGGAGGCAGAG |
| | GTTGCGGTGAGCTGAGATCGCGCCATTGCACTCCAGCCTGGGCAACAAGAGCAAAACACCA |
| | TCTCAAAAGGAAAAAAAAAAAAAGAAGAGATAGATTTGGCTTCAAATAACAGGAAAACAC |
| | AAAATAATAGTGGCTTCAGTAAGACAGGACATTATTTCTCTTTCTCATAAACACTCA |
| SEQ ID NO: 668 | ATGAGGAGCATGGCCACGATGGCCGGCCTCATGTGTCTGGCTCACTTCTCTCAGGATTCCTA |
| | AAAGGGATTTCTCACATCAGCTTCCATTGGTCTTTCATTTCTGTGGGGCAGCAGGGATTATA |
| | CTCTTCTCTCCTGCCCCTAAACAATGTAACGAGACACTGTGGAGTGCTGTCTGTGGACACAC |
| | AGGAGGTGGGCCTGGAACCCAGTGCTCCTGCCTCCAGCTCCAGATAAAGGAATGCACCTTC |
| | GACTGTCTCCTCTAGGACCCCAGTGTAGCGGGAATGCCTTAAAACAAAGTTGT |
| SEQ ID NO: 669 | AAGGAACTGCTGGTTGGAAGCGGGCCGAGATGAGAACGCAGTTGCGCTCTCTGACCAGCCA |
| | GGCCTATGCATGACGTCACGCCGGGAGGTGGAGTATGTAGATTAAAGACTGCATTTTGGAA |
| | ACGCGTTCCTTGGAAGGATTTGCACAACTCTGTTACCAACACCAAGATATAGTATAAAAAA |
| | TCTGTTTATTTTGTTCACTATATGTGGATAAAGTCCAATTAGAGTCATTTCAGGAGTTACCCG |
| | CACTTGCAATGATGTGGGCGGCACCGGGGATTGCTGGGGTCACGCAAGTACCTC |
| SEQ ID NO: 670 | GCTGGGCTTACAGGCACCCGCCACCATGCCAGGCTAATTTTTGTATTTTTAGTAGAGATGGG |
| | GTTTCACCATGTTGGCCAGGCTGGTCTTGAACTCCTGACCTCGTGATCTGCCTGCCTTGGCCT |
| | CCCAAAGTGTTGGGATTACAGGCGTGAGCCACCGTGCCCAGCCATTTCTGGCTCTTAAACTT |
| | TGGAAAAGTCTTTATCTTGTAAGTAGCAGGCTAGAACTTGTGCAAGAAGAGTGACCCTATG |
| | TGAAGAGTGTTTTGAATCTGAGGGTGAGATGTCAGGCAACAACCATGCCTTC |
| SEQ ID NO: 671 | TTAAGTTTTATTTCAGTCGTGTCACCAAGCATACTAGGAAAGGACATACTGAATGAGATCAT |
| | CCAAAGGGGTGTGGAGTATGTAGATAAGCGCAGTGACTGCTGGCTATTTGCACCCTAGGCT |
| | TATATTTCTTAAGATTTTGAATAGCCAGATATTAAAAATACAGGTGCTGGGTTATTGTAGTT |
| | TGGAAAATATCTTTATTCCAGAAATTAGGGGGTCTAAAGAGCACATGAGAAAAATGATCCT |
| | ATATTTAGAGTGGTTTGAATCTAAGGGTGAACTCTCAGGCAGCGCTGGGGACTC |
| SEQ ID NO: 672 | CTCAGCCTCCCGAGTAGCTGGGATTACAGGCGCAGGCTACCATGCTCGGCTAATTTTTGTAT |
| | TTTTTAGTAGAGATGGGGTTTCACCATGTTAGGCTGGTCTCAAACTCCTGACCTCAAGTGAT |
| | CCACCCGCCTCAGCCTCCTAAAGTGCTGGGATTAGTCGTGAGCCACCACACCTGGCCCTTTC |
| | CTTCCTTTTCTTCCTTTCTTTCCTCACTTCCCTTCCATTCCTTCATTCCTTCTCTTTCCTTCCCC |
| | TGCCTTCCCTTCCTTCCTTTCTTTCTTTTGTCTTAAAGATTCCTGTGAT |
| SEQ ID NO: 673 | TACTTTCTGCTGATAATATTAATATTTCTGGAATGCTATCTGGCAATTTAAATACAAAGGTC |
| | CAACAATGTTCATATCCTTTTATCCCTTCAGTTTTATGTCTGGGATGTTATTTTAAGGAAATA |
| | GTCAGAAATCTATTTTTAATTAACGTAAAAAGATGTTTCTTATCATTATTTATAACAGTACAC |
| | AATTTAAAACAAAATTTAAAAAATTTAAAATTTAAAACAAAATAGGGACATAGTTAAATAA |
| | ATGATTATGTTTCCATATGATGAAATAGTATGTGTTAAAAATAACATTTAC |
| SEQ ID NO: 674 | CAGGCGCCTGCCACCATGCCCAGCTATTTTTTTGCATTTTTAGTAGAGATGGGGTTTCAGCC |
| | TGTTATCCAGGATGGTCTCGATCTTCTGACCTCGTGATCCACCCACCTCGGCCTCCCAAAGT |
| | GCTGGGGTTACAGGCGTGAGCCACCGTGCCCGGCCCACACCTGGCTAATTTTTGCGTTTTTA |
| | GTAGAGACAGGGTTTCATCATGTTTGCCAGGCTGATCTCAAACTCCTGTCCTCAAGTGATCC |
| | GCCTGCCTTGGCCTCCCAAAGTGTTGGGATTACAGGCGTGAGCCACCACACC |
| SEQ ID NO: 675 | ATTAGACAAATTAACATTATTGATATAGCAGTTTGCCATATTGAAAAGTATGAAGATTTGAA |
| | TCAAAGTTACCAGCTATAAAATTTGGACAATTGTGTACAAAATAGAAATAACAATACCTAG |
| | CTTACAATACAGTTGAACAAGACGGTATCTGTAAAGCATGACGTGTATATAGTGCATAGCA |
| | TGTTAACAAGTTTCAGTTCCCTCCTCTCCATTCGCCTCAAATCTATCAGGAGCGCTAATCTCT |
| | AACCATCTCTATGCTCTGACACAAAGTTCCCTGTGAAAAACATTATACAAAGT |
| SEQ ID NO: 676 | ATCAGCAAAAGGTTAAGGTAACTGAACAGGACAAATGACCCAGTTTCTCTAACAAATCAAT |
| | GGCATGAAAGGAAACAAAAGGAAAGGGAGAATGTTAGAGAATAAAGGAGACCCAAGAAA |
| | CATAATAACCAAATACAAATGGCTTTATTTGAAGCAGGATCCAAGCAACTTATGAAAGACA |
| | TTTTTTAGACAAGTGAGAAAACATGAACGTGAACTGTGTATTAGATGATCATCAGGCATCA |
| | CTAGTACTTTTGTTAGGTGGGATAACAACATGGCGGCTGTGTTTAAAAAGGAGAAAGG |
| SEQ ID NO: 677 | GGAGAAACTCATAACAAATGTCAAGTAGAAAAGAGGGTTGTGAAGCTCTTAGGATGTTGTC |
| | AGAAGATGAATAGGATTTTTACAATGACCGATGTTTCAGAAAAGGAAAAACAATATTGATG |
| | ATTCTTAGAGATAAATTTATAGCTAGAGTAAGAAGTCATGAATCTGTAGTTCAGGAAACTTG |
| | AAATAATAGGTGACACAGAACACATAGTTTATCTCCTTTTTATCTTCTCATTTCTGAAACAA |
| | GAAGTTGCTCTGTAAATTAGAAAAACTAGAACAAACAAAAAGAAAATAGACAAT |
| SEQ ID NO: 678 | CCTCTACCGTGAGTCTCCTCTTCCTCTCTACTGAAATCCCAAACATTTCTTGAAATAGTGGCT |
| | CTTATACCTTACTATGCATAAGAAAAACCCTGGAGCATCTGAAAGAGTTCTGTTTCCAGCTC |
| | TCCCTGCCCTAGAGGTTCTGCTTCACTGGGGCTGGGATAGGATGTGCACAGGACATTTTTTT |
| | GTAAGCTGTCCAGTCAACTCCAAGACAATCATGGCTCTGGTCTGAAAACGACTGCTTTCCGC |
| | TTTTCTCTGCACAACCTTCCCCAAATCCAGCTCTCAGAATTAATTGCTCTC |
| SEQ ID NO: 679 | ATGAGGTACCAAGACACTGAATAATGGGAATGTAATAATTTGGAACACAGATGCTGCTACA |
| | GGTCAGGGCTTTCATCCTATCCTGGTATAAAAGTCATACCGCTTTCTAAGAAATCTTTTTACT |
| | TTTAAATAATATACATATTGCTTGATTTAGATACCCAATCAAAACACATTCTTTCCAAGTAT |
| | GAAATTTAATTTGTATACATATGGAATAAAGATAAATAGAAAATCCATTTTGCTAATATACG |
| | TAATAGTTGCATGTAGCTGACCAAAGCATTCACATGTGGGGCCTAAACATTT |
| SEQ ID NO: 680 | GTAATACGGCAACATTGTATTCACAGAAGTACAGAATACATAGGAATACTGTCTCTACAGT |
| | CTTGGGCCTTTCTGCTGGCAACTGTGACACTGTGACACACACATTTGCTTTTTATTACATCAA |
| | AATGTGATGTGTTCTCTATTCTCAACCCCAGACAGCCTGCATTTCTCACTAGGTCCTGCCAAT |
| | TTGTATTCTTCCAAAACCACCCAATTCTTTAGACAGATCCTTTCTCTCTAGAGGTGTGTTCAT |
| | TAGCTCTGCAGAACGTATAGTCTCCATTCATTAAAATTTAAAAAAAAACT |
| SEQ ID NO: 681 | AACATCTTCACCATCATGTTTATCAACCTCAGAGTATTCTATGGTAAGAATGTTTATTTATTC |
| | AATTCCTATAATCATATTTAGGATATATATATTATTATTATTAAAAAGTGGACTGCTGTGAA |
| | CATGTTTGCCAGATTTTTATGCATTATCATAAATGCACAATTTATCCTTTTCTTAAAGATAAA |
| | TTTCTAGAGGTAGAATTTCTAGATCAAAGAACATACAGGTTTTTTTAATAGCTTTTAAAATA |
| | GATAAAGTGGCCAAGTTTCTATCAATTTTACGTTTGTGTATTAAAACGCA |
| SEQ ID NO: 682 | GCAGGCGGATCACCTGAGCTCAGGAGTTCGAGACCAGCCTGACCAACATGGAGAAACCCCA |
| | TCTCAACCCTGTCTCTACTAAAAATATAAAATTAGCCGGGCATGGTGGCGCATGCCTGTAAT |
| | CCCAGCTACTCGGGAGGCTAAGGCAGGAGAATCTCTTGAACCCAGGAGATGGAGGTTGCCG |
| | TGACCTGAGATCGCGCCATTGCACTCCAGCCTGGGCAACAAGAGCGAAACGCCATCTCAAA |
| | ACAAAAAGAAAAGAAAACTACAAAACAAAGAATCAAAGATATAAATAAATGAAGA |
| SEQ ID NO: 683 | TCTCCTGGGTTCAAGCAGTTCTCCTGCCTCAGCCTCCCGAGCAGCTGGGATTACAGGCGCCC |
| | GCCACCACGCCCAGCTAATTTTTGTATTTTTAGTAGAGACGAGGTTTCACCATGTTGGCCAG |
| | ACTGGTCTTGGACTCCTGACCTCAGGTGATCCACCTGCCTCCCAAAGTGCTGGGATTACAGG |
| | CGTGGGCCACCACGCCCAGCCAATTACATGATTTATCTCATGTGTTAGAGGTGATAACTATA |
| | TGGAAAAGAATAAAAGAGGGAAGGGAGCCTTGTGATTTTAAGTAAAGAGGTC |
| SEQ ID NO: 684 | TGTGTGTGTGTGTGTGTGTGTGTGTGTGTGTGTGTGTTTTAAGTCCCTAGAAAATAATGCAG |
| | CACTCTAGTCCTCCCAGTTGTCCTCTCAAATCTATTTTCCATCTTCCTGGATACATGGCTGCC |
| | TAACCAGTGGCTATATTTCCCAGCCTCTAATATTGGGCTAATGAGAAGTAGGCAGGAGTGA |
| | ATGACCTGAGCCACTTCCGGCTATTTTGCTTTTGCCCTTTCTCAGGTGCATCAATGTGGAGAC |
| | GGCAAGGACAGCAGCAGCAACAGCACCTGGGAGCTCGTTAGAAAGGGAAAT |
| SEQ ID NO: 685 | ATCTCATGATGTATATGCAATATTCCAAAACTCAAAAAAATCTGAATCCAAAGCACTTCTGG |
| | TCCCATGCATTTCTGATAAGGGATATTCAACCTGCATCAGTTTTCCTGTTTGTTTCCTTTGAC |
| | TTCTCTTCCACACTGCTGGTTTCATCATATGTCTGGTCGGTCCTCCCTGTCTGTTATGGAAAG |
| | GATTCTGTGATTTGTGTGGATTTCCTATCCTTCTGTGTAGGAAGGCCTGTTTCCTGGGGATAG |
| | GTGGAAGAAGGGGGTTTGTCCAGGGCTTACAGATAAGATTTCACTCTAG |
| SEQ ID NO: 686 | GGGATTCACCAGGGCACAAGGCGACGTGCGTCTGTCCTCACGGAGCCTAAGTGCTGGTGGA |
| | GACGGACAGTGCAGATGCCAACCGCAAATGACGAGGCACTTGCAGGTAGGGGTCAGCGCC |
| | AAGAAGGAAATGAAGGGTGCGTGTCGCTGACTGAGACTCTGGTGGGGGCTACTTAAATAGG |
| | GCCATGGGGGAGGGCCTCTCTGAGGAGGTGACATTTGAGCTGAGGCCTCACCAATCAGAAG |
| | GAAAAAGCTGTAAAGGGTCTGGGATTAACTCAACCTGGGGACTTTTAAAATAATGTA |
| SEQ ID NO: 687 | GGGATTCACCAGGGCACAAGGCGACGTGCGTCTGTCCTCACGGAGCCTAAGTGCTGGTGGA |
| | GACGGACAGTGCAGATGCCAACCGCAAATGACGAGGCACTTGCAGGTAGGGGTCAGCGCC |
| | AAGAAGGAAATGAAGGGTGCGTGTCGCTGACTGAGGCTCTGGTGGGGGCTACTTAAATAGG |
| | GCCAAGGGGGAGGGCTTCTCTGAGGAGGTGACATTTGAGCTGAGGCCTCACCAATCAGAAG |
| | GAAAAAGCTGTAAAGGGTCTGGGATTAACTCAACCTGGGGACTTTTAAAATAATGTA |
| SEQ ID NO: 688 | GTCAGGAGTTTGAGACCAGCGTGGCCAACATGGTGAAATCCCGTCTCTACTAAATACACAA |
| | AAATTAGCCGAGCATGGTGGCACACGCCTGTAATCCCAGCTACTTGGGAGGCTGAGGCAGG |
| | AGAATCGCTTGAACCTGAGAGGCAGAGGTTGCAGTAAGCCGAGATCGCACCACTGCACTCT |
| | AGCCTGGGCGACAGAGGGAGACTCCATCTCAACAGAAAAAAAAAAAAAAAGAACATCCCA |
| | CAGCAGAAGTTCGTTCATTTATTCATTCATTTATTTTATTGTTCAACAACTACATCT |
| SEQ ID NO: 689 | AAACATCCTCAAAGATTAAGAAAAGGCACTGCAAATATCAGATCAATTATGAAAACGATGT |
| | TCTGATTAGATGTCATTTGAATTGCACTATTATTCACCAAAGGATATTGTAGGCAAGCATTT |
| | GTAATAGGGGAGGAAATGATTTGGAATTGCTAAAGATTAGGAGGGCTTGAAAACAAGCCTT |
| | TATTGGCCTTTGAAGCCTTGGGAAGAATGTTTGCTCTTCAGGTGCCCGTGTAGCCCTGCTCT |
| | GGAGATCTTCTCAGATGCTGTCCTACTGCATTGTCCAAATTAAACAGAGAAGTC |
| SEQ ID NO: 690 | GGTTTCACCTTGTTAGCCAGGATGGTCTCGATCTCCTGACCTCATGATCCACCCGCCTCGGC |
| | CTCCCAAAGTGCTGGGATTACAGGCGTGAGCCACCGCGCCCGGCCAATACGGCAGTTTTAA |
| | GTAGGAATTTACTAAGTTCAAAGCGAACTAATGTGTCTCCTAAAATTCAAGTCCTATATGGT |
| | GTCAGCATTTTCATTGTAATTGATAAAGTATTAACCAGCCATTTGAACATCTATTATATGAT |
| | ATGCACTGAGCTCAAGTCTAGATACACAAATGAGTAATAAATGAACCCTTCCA |
| SEQ ID NO: 691 | TGTCTGTGTTTTATATCATTTTTCTTCTATTTGTGTTTGTCTCTGTGTCTAAATTTTCTTTTTAT |
| | AAAAGGACATCATTCGTACTAAAGTAGGGCCCACTCTAATGACGTCATTTTAAGTTGCTCAT |
| | TGCAAAGATCCTATTCCCCAGTAAGGTCACATTCACAGGTACTTAGGGTTAGGATTTAAACA |
| | ACTATATATACATAGCTGGAAAATATTGACCCCTCCATTGAGGGATAGATAGATAGATAGA |
| | TAGATAGATAGATAGATAGATAGATACTCAAAAGTATATATATATGCTTT |
| SEQ ID NO: 692 | ATACTATACATAAACATTGATTGAGCTCGGGGGGACTTTCTGTATATACATTTAAAAATATG |
| | TTTTTTTTAATAGAGACAGGGTCTCACTGTGTTGCCCAGGCTAGTCTCAAACTCCTGGGCTC |
| | AAATTATCCTCCCCACTTGGCCTCCCAAAAGGATGGGATTACAGGCATGAGCCACTGCCCA |
| | AAGGCTAAAATTTTTTTAAGTACCATTAGAATGTAAGGATTCTTTTTAAAAAATTTGATTGT |
| | GCAGGGTTGGTTATTCAACCAATATGCAATACAATATTCAATACTGTATATTC |
| SEQ ID NO: 693 | TGTGGCTTTGGCTCCTGTCCCTGTGAGGGTGTTAAAATAACATCCTCAAAGTGAGTATCTGG |
| | TCTGGTGGCCTCACTTCCTGTTCATGATGGCTGAGTTCTTGGTTTCTGGCACCTGGAAGTGTC |
| | CTTTTCCTGTGTAAGCACAGCTTCACTTTTTACACTTAAAAAAAATTTTATAGAGTATTTTAG |
| | TTAGGTGTTGGGGCAACAGGGTGAGGGTGGTTGGAGGTGCTTTCCCACATCAGCTGGGTTC |
| | ACCCTCTTGACTGGCGATCAGTAGTTTTACTTTGTATTAGAAACAAAACCC |
| SEQ ID NO: 694 | GAGTAGGGAGGAGAAGAGGTGGGGACAGGAAATGGAAAGTAGCAAGAAAAGGGGAAATG |
| | TAGAAGAGAGGGAAGGGGGAGGGAGATGGGGAGAGGGAGGAGGGAAGAGGCATGGCAAG |
| | AGGAAGTGGGAAAGGGAGTTGGGGAGGATAAGTCACAGACTGAGCAACCACAGTTCCTCA |
| | CACTGTGCTTGATTATTTCCGTAGAGGTCAATCCATTTACTTCTTATAATCTGTGAGCTGAGT |
| | CAGGAAGCTTGCAACTCAGTAAGGCAGAAGCCTTAGATTCACACAGCCAATAATATTGG |
| SEQ ID NO: 695 | TTCCCACAAAGGTAACATCTTGCAAAAGAATAGTATAAGATCTCAACCAGGATAGTCAATC |
| | CACTCATCTGATTTAGATTCCCCAAGTTTTACTTCTCCTTGTGTGTGTGTGTGTGTGTGTGTG |
| | TGTGTCCTCTCCAGCTACAAATGTCATGTTCCTTATTCAGGATAATCTGTGGTTAAATTCAGG |
| | ACTTAGAGAGAGAAGGAGGTAGGTTTATGCAAATATCAGATTTCTTTGATGGTAGGCAACA |
| | AATGGACACAGGCTAACTTAAGGAAAAAGGAAATCTATAAAAGCTACGTAGG |
| SEQ ID NO: 696 | CCCACATAACATAATATTTACTACCTTAAACATTGTTAAGTGTATAATTTAGTAGTGTTAAG |
| | TATATTTACGTTGTCATGAAATAGGATCTCCAAAACTTTTTCATCTTGCAAAACTGAAACTC |
| | TATACCCCTTAAACAACAACTCCCCACTTCCCAACCAACTCCTGACAAACAACATTCTACAT |
| | TTTGTTTCTGTGAATTTGACTACTCTACATATCTTATATAAGTGGAATCATACAGTCCTGTTT |
| | TTTTGGTGACTGGTTTCTCTTTGGTAATTGATTCTTTAAAAAGAATCAGGC |
| SEQ ID NO: 697 | AAAGAACTTACTCATGTAACTAAACACCACCTGTTCCCCAAAAACCTGTGGAAATAAATTTT |
| | TTTTAAATAAAGGAATTTGAGACCCCCCGCCAAAAAAAACCAAAAAACCCAAAAGTACATG |
| | ATGGCTTTGGAAAATAGGCAAGAGGGTTAATGAATTAAAGGCCTTGAGGCAGTTTAAGGGT |
| | AAATTCAGGGAGTATAAGGTTTAAGAGAAGTAGAACAACAAGTAGTTCTGAGAGTGGACCC |
| | TCTGTGTTTGGTTTTGGAAGTAGAGCCATTCCAAGTGTCACTCCAGCAACAAATA |
| SEQ ID NO: 698 | ACAGCTAGGGAGAAGATCAACAAGGAAATAGATTTGGACAACGTGATAAACCAACTAGAG |
| | CAGAATATACATTCTTTTCAAGTGCACGTGGAACATTTTCTAGGACAGAACATAAGTTAAAT |
| | CACAAAAGAAGTCTCAGTAAATTTAAAAGGATTGAAATCATACAAAGTACTTTGGAATTAA |
| | ATTAGATGGAAAGGAATGAAATTAGAAATCAATAAAAGAAGGAGATTTGGGTAATTCATAA |
| | ATATGTGGAAATTAAACAGCACACTCCTAATACAAATAGGTTGAAGAAGAAATCAC |
| SEQ ID NO: 699 | CAAATATTTGGGAACCAAATAATGTGCTTTCAATTACCCTATGAATCAAATAAGAAATCATA |
| | ATGAAAATTAGAAAGTGTTTTGAACTGACTGAAAAGGAAAACACAACATATCAAAATTTGT |
| | GAGAGGCTGGTTAAAAAAAAAAAATGACTCGGGAAATTTCGTAGCAGTAAAAACACCTCTA |
| | TGAAGAAAGGTCTCAAGTCAATGAGCTCAGAAAACATGTTAATAAATGAGAAAAAGGAAA |
| | ACAAATTAAATTAAACAGAACAAAGGTAATGGTAAGTGTCAGAGTAGAAATAATAC |
| SEQ ID NO: 700 | CTTTTTTTATTATGGCAGAGTACATGTAACATATAGTTTGCTATTCCAACTGATTTTTGACAA |
| | AGATACAACAGCAAATCAATGGAGGAACAATAGCCTTTTTAACAAATGGTGTTGGCACAAC |
| | TGGACAACTGTAAGCAAAAGAAAATGAACTTCAATCTAAATCTCACACCGTATTAAAAAAA |
| | ACTCAAAGTGGGCCACAGACTTAGATATAAAATGTAAAACTATAACACTTTTAGAAAAAAT |
| | ATAGGAGAAAATCTATGGGATTTAGGGCAAAAGCATGATTCAAAAAAGGAAAGT |
| SEQ ID NO: 701 | TTTGAGATGGAGTCTCACTCTGTCGCCCAGGCTGGAGTGCAGTGGTGCGATCTCGGCTCACT |
| | GCAAGCTCTGCCTCCCAGGTTCAAGCCATTCTCCTGCCTCAGCCTCCCAAGTAGCTGGGACT |
| | ACAGGCGCCCGGCTAATTTTTTGTATTTTTAGTAGAGATGGGGTTTCACCATGTTAGCCAGG |
| | ATGGTCTCGATCTCCTGACCTCGTGATCCACCTGCCTCAGTCTCCCAAAGTGCTGGGATTAC |
| | AGGTTTGAGCCACCGCGCCCGGCCAGGGCAGGGTATCTCTCTTAAAACCTGG |
| SEQ ID NO: 702 | ATGTCTGCTTCCCCCTTTCCACCACGATTATAAGTTTCCTGAGGCCTTTCCAGTCACGCTAAA |
| | CTGTAAGTCCATTAAATCTCTTTCCTTTACAAATTACCCAGTTAGCAGCATGAGAATGGACT |
| | AATACACTTAGCTATACTAAGGAGATACACTGGTGAACAAAACAGACAAAACTCCCTTCCC |
| | TCACTGACTTTACATTATACTGTTGTAGAGTTTCTCTCAAACCTGATGATGGCTTTCCAATTC |
| | CGATCGAAACAGAAAATAAGGTAATGAACTCTGGATTAAGAATCATCTGAG |
| SEQ ID NO: 703 | CTTTTTTTTTTAACCTAACACTGTATCTTGGAAATGACTTCATATTAGTCCACAAAGAGCTTC |
| | TTTGTTTTTTATTCTATTTCATTTTGCCAGCCCCCTATTGAAGGAAACATATTGCTTCCAGTCT |
| | TTTGCTATTATCTAACAATGCTGCAATGAATAACATTGAACATATGTCAGATAAATTCCTAG |
| | GGGTGGAATTACTGGGTCAAAAGGTATATATATTTATTATGTTTGATAGTGACTTCCAAATT |
| | AAACTGAAAATTTTGTAATTTTTTTTCCACTCTAAAGAAATAGAAGTTC |
| SEQ ID NO: 704 | CAGAGCGAAAATGACTGTTAGATACAATAGAACACTCTAAGAGTCATTATCAAAAATGAGC |
| | ATATCGGTGTGTAAAATGTATGGTAGTTTTATTTAACGGTTGTTTCATTGTTTACCGTAGTGT |
| | TTTTTCTTACAATTTTGTGGAAGCCTGTGTCAGAGTTAAGAACTTTTATAGAAGAGGATAAT |
| | CATGGATGATTGAAATTGACATTTTAAGCTGATACTGAAAGTTATTCTAACTTCTATTACATT |
| | TATAGTTGTATTTTCTTTCAAAGGATAATGGAAGTCTTAAAAAGAAAATGG |
| SEQ ID NO: 705 | CGCAACACCTTCTTATTTCACGACGTATGGTCGTAAAGCAATAAAGATCCAGGCTCGGGAA |
| | AATGACGGAGAGGTGGAACTATAGAGAATAAATTTGCATATATAATAATCCGCTCGCTAAT |
| | TGTGTTTCTGTTTTCCTTTGCTAAGGTAGAAACAAAAGAATAATCACAGAATCTCAGTGGGA |
| | CTTTGAAAATATCCAGGATTTTATACGTGAAGAATGGATGTATCGCATTACGGTAGTCACCC |
| | TATGTGTAAATTAGTGGCACATACTTGGCACTCCTTAATGTCAACTATAAGATG |
| SEQ ID NO: 706 | TCTATTTTGGTTACTACGGTAGGTGCCTGGCGGAAGGGAGTGGGCGGAGATATGTAAATAG |
| | AAAGTGCGTACAGTTAGAACGTCCGGCACGTAACTGATCGGAGCATTCTGGGAAGAAGTAA |
| | TTTATTCCTTTTCGGCAGCCGAATGAAAAAAAAATTTAAAAAAATGTGCGAGCTAATATGG |
| | CAAAACAACTGGAAGGACGCTAAATAATAGGATTGCTCATACCAGCGCGTTATGAACTCAC |
| | CCTAGCTTGTAACGGAATCTTTTTCACTGAGTGCAGAATGTCGGCTGTTTGTCTGT |
| SEQ ID NO: 707 | TCCGCGGACCAACTCTCGCGACAGCCAGCTCAAAGCAGGCAAGAACCGGAAGGGGGGGG |
| | ACGTTCCCCGTGAGCCTTCGCGGTGCTGGCTGCTCATCTGCATACGGAAGTTCGGCACATTA |
| | TGAATTATTTATTTTCCTCGAGGGAAAAAATTAAATGAAAAGCAACAAAATACATTATTAA |
| | CAAGTGAGACAAACTTCAATGGAACTGGATCATGACCTCAACAGTCAACTACGATAGTCAT |
| | CATACGCCTAATGAGAATAGAATTCATTACCTAGGAAATAAACTAAAAACGTCCTT |

[0162] In some embodiments, a promoter sequence may have at least about 70%, at least about 75%, at least about 80%, at least about 83%, at least about 85%, at least about 87%, at least about 90%, at least about 91%, at least about 92%, at least about 93%, at least about 94%, at least about 95%, at least about 96% at least about 97%, at least about 98%, at least about 99%, or about 100% sequence identity to any of SEQ ID NO: 13-SEQ ID NO: 17, SEQ ID NO: 167-SEQ ID NO: 707, SEQ ID NO: 1241, SEQ ID NO: 1248-SEQ ID NO: 1253, or SEQ ID NO: 1259-SEQ ID NO: 1263. In some embodiments, the promoter sequence comprises a sequence of SEQ ID NO: 13-SEQ ID NO: 17, SEQ ID NO: 167-SEQ ID NO: 707, SEQ ID NO: 1241, SEQ ID NO: 1248-SEQ ID NO: 1253, or SEQ ID NO: 1259-SEQ ID NO: 1263. In some embodiments, the promoter sequence is selected from SEQ ID NO: 13-SEQ ID NO: 17, SEQ ID NO: 167-SEQ ID NO: 707, SEQ ID NO: 1241, SEQ ID NO: 1248-SEQ ID NO: 1253, or SEQ ID NO: 1259-SEQ ID NO: 1263. In some embodiments, a PSE of a promoter sequence of any of SEQ ID NO: 13-SEQ ID NO: 17, SEQ ID NO: 167-SEQ ID NO: 707, SEQ ID NO: 1241, SEQ ID NO: 1248-SEQ ID NO: 1253, or SEQ ID NO: 1259-SEQ ID NO: 1263 is replaced with a PSE of any of SEQ ID NO: 31-SEQ ID NO: 37 or SEQ ID NO: 67-SEQ ID NO: 120. In some embodiments, a PSE of any of SEQ ID NO: 31-SEQ ID NO: 37 or SEQ ID NO: 67-SEQ ID NO: 120 is inserted or substituted into a promoter of any of SEQ ID NO: 13-SEQ ID NO: 17, SEQ ID NO: 167-SEQ ID NO: 707, SEQ ID NO: 1241, SEQ ID NO: 1248-SEQ ID NO: 1253, or SEQ ID NO: 1259-SEQ ID NO: 1263. In some embodiments a PSE sequence is extracted from any of SEQ ID NO: 13-SEQ ID NO: 17, SEQ ID NO: 167-SEQ ID NO: 707, SEQ ID NO: 1241, SEQ ID NO: 1248-SEQ ID NO: 1253, or SEQ ID NO: 1259-SEQ ID NO: 1263 and inserted into a different promoter (e.g., any of SEQ ID NO: 13-SEQ ID NO: 17, SEQ ID NO: 167-SEQ ID NO: 707, SEQ ID NO: 1241, SEQ ID NO: 1248-SEQ ID NO: 1253, or SEQ ID NO: 1259-SEQ ID NO: 1263). In some embodiments, the PSE of a promoter of any of SEQ ID NO: 13-SEQ ID NO: 17, SEQ ID NO: 167-SEQ ID NO: 707, SEQ ID NO: 1241, SEQ ID NO: 1248-SEQ ID NO: 1253, or SEQ ID NO: 1259-SEQ ID NO: 1263 is replaced with a PSE extracted from a different promoter (e.g., any of SEQ ID NO: 13-SEQ ID NO: 17, SEQ ID NO: 167-SEQ ID NO: 707, SEQ ID NO: 1241, SEQ ID NO: 1248-SEQ ID NO: 1253, or SEQ ID NO: 1259-SEQ ID NO: 1263) or is replaced with a PSE of any of SEQ ID NO: 31-SEQ ID NO: 37 or SEQ ID NO: 67-SEQ ID NO: 120.

[0163] Promoters of the present disclosure may have insertions or deletions of nucleotides on either side of the promoter. Nucleotide bases may be inserted or deleted between the promoter and the 5′ ITR or between the promoter and the payload. In some embodiments, a promoter sequence of the present disclosure (e.g., any of SEQ ID NO: 13-SEQ ID NO: 17, SEQ ID NO: 167-SEQ ID NO: 707, SEQ ID NO: 1241, SEQ ID NO: 1248-SEQ ID NO: 1253, or SEQ ID NO: 1259-SEQ ID NO: 1263) may be truncated by 1 to 2, 1 to 3, 1 to 5, 1 to 10, or 1 to 20 nucleotide bases from the 5′ end, the 3′ end, or both the 5′ end and the 3′ end. In some embodiments, a promoter (e.g., any of SEQ ID NO: 13-SEQ ID NO: 17, SEQ ID NO: 167-SEQ ID NO: 707, SEQ ID NO: 1241, SEQ ID NO: 1248-SEQ ID NO: 1253, or SEQ ID NO: 1259-SEQ ID NO: 1263) may be truncated by 1, 2, 3, 4, 5, 6, 7, 8, 9, 10, 11, 12, 13, 14, 15, 16, 17, 18, 19, or 20 nucleotides from the 5′ end, the 3′ end, or both the 5′ end and the 3′ end. In some embodiments, 1 to 2, 1 to 3, 1 to 5, 1 to 10, or 1 to 20 nucleotide bases may be added to the 5′ end, the 3′ end, or both the 5′ end and the 3′ end of a promoter sequence of the present disclosure (e.g., any of SEQ ID NO: 13-SEQ ID NO: 17, SEQ ID NO: 167-SEQ ID NO: 707, SEQ ID NO: 1241, SEQ ID NO: 1248-SEQ ID NO: 1253, or SEQ ID NO: 1259-SEQ ID NO: 1263). In some embodiments, 1, 2, 3, 4, 5, 6, 7, 8, 9, 10, 11, 12, 13, 14, 15, 16, 17, 18, 19, or 20 nucleotides may be added to the 5′ end, the 3′ end, or both the 5′ end and the 3′ end of a promoter (e.g., any of SEQ ID NO: 13-SEQ ID NO: 17, SEQ ID NO: 167-SEQ ID NO: 707, SEQ ID NO: 1241, SEQ ID NO: 1248-SEQ ID NO: 1253, or SEQ ID NO: 1259-SEQ ID NO: 1263). The nucleotides being added to the 5′ end or the 3′ end of the promoter may be selected from any nucleotide (e.g., A, T, C, or G). For example, SEQ ID NO: 1250 comprises an 18-nucleotide base truncation of the 5′ end of SEQ ID NO: 376. In another example, SEQ ID NO: 1251 comprises a 2-nucleotide base truncation of the 5′ end and a 2-nucleotide base addition to the 3′ end of SEQ ID NO: 168.

[0164] A promoter (e.g., any of SEQ ID NO: 13-SEQ ID NO: 17, SEQ ID NO: 167-SEQ ID NO: 707, SEQ ID NO: 1241, SEQ ID NO: 1248-SEQ ID NO: 1253, or SEQ ID NO: 1259-SEQ ID NO: 1263) may have nucleotide additions on the 5′ end in order to extend the expression cassette. In some embodiments, a promoter (e.g., any of SEQ ID NO: 13-SEQ ID NO: 17, SEQ ID NO: 167-SEQ ID NO: 707, SEQ ID NO: 1241, SEQ ID NO: 1248-SEQ ID NO: 1253, or SEQ ID NO: 1259-SEQ ID NO: 1263) may have additional nucleotides added to the 5′ end in order to extend the promoter to a total length of 200 nucleotides, 300 nucleotides, 400 nucleotides, or 500 nucleotides long. For example, SEQ ID NO: 1262 is an extended version of SEQ ID NO: 1250 with an additional 118 nucleotides added to the 5′ end to extend to a total length of 400 nucleotides. In another example, SEQ ID NO: 1263 is an extended version of SEQ ID NO: 1251 with an additional 100 nucleotides added to the 5′ end to extend to a total length of 400 nucleotides.

### Termination Sequences

[0165] An expression cassette may comprise a termination sequence (also called a terminator). A termination sequence may be an endogenous termination sequence. A termination sequence may be an engineered termination sequence engineered to increase expression of an RNA payload. Examples of endogenous termination sequences (e.g., SEQ ID NO: 1243), engineered termination sequences (e.g., SEQ ID NO: 60, SEQ ID NO: 1242, SEQ ID NO: 1256, SEQ ID NO: 1257, SEQ ID NO: 1275, or SEQ ID NO: 1287-SEQ ID NO: 1289), and additional termination sequences (e.g., SEQ ID NO: 771, SEQ ID NO: 930, SEQ ID NO: 1002, SEQ ID NO: 1007, SEQ ID NO: 1017, SEQ ID NO: 1021, SEQ ID NO: 1244-SEQ ID NO: 1247, SEQ ID NO: 1254, SEQ ID NO: 1255, or SEQ ID NO: 1264-SEQ ID NO: 1272) are provided in TABLE 6.

TABLE 6
Exemplary Termination Sequences

| SEQ ID NO: | Sequence |
|---|---|
| SEQ ID NO: 60 | CCCAATTTCACTGGTTTCAAAAACAGAAAAACAGTTCTCTTCCCCGCT |
| | CCCCGGTGTGTGAGAGGGGCTTTGATCCTTCTCTGGTTTCCTAGGAAA |
| | CGCGTATGTG |
| SEQ ID NO: 771 | CTATTTAAAAAAAAAAAAAAAAAAAAGGAAGAAGAAAGGAAAAAA |
| | AAACGGTTAAGGCCAGGAGGAAGCATCTCAGTGGCAGGTCTTAGCCT |
| | CATGCCCA |
| SEQ ID NO: 930 | CTGAAATAAAAAAAAAGAAAAACAAAGCTCAAGTTTGCCTCATTTGG |
| | CAAATGATTCCCAGGTGAAAGCTAGCGTTCCATGTTCTGCCTACTACT |
| | CTCTA |
| SEQ ID NO: 1002 | AATTTTTGTAATGAAAAAATAGACGGCAAGGGTTATTCTTAAAACTG |
| | CAGTTTTGTAGCTTGGGTGGCATGTTAAGTGTTCTCCTTACAGTCGCA |
| | ACGAT |
| SEQ ID NO: 1007 | AATTTTTGTAATGAAAAAATAGACTCCCCTATAAGGGTTATTCTTAAA |
| | ACTGCAGTTTTGTGGCTTGGGTGGCATGTTAAGTGTTCTCCTTACAGT |
| | CGCA |
| SEQ ID NO: 1017 | ATCATGTTTTATAAAAAAAGACTTAAAGAGGAAAACATTATGGTGCA |
| | ACTTTAGGCTTAAGTGATTCATTGTCACTGTTTGTTTAAACATTGTGT |
| | AACAG |
| SEQ ID NO: 1021 | GTCACTCTTGTCCAATGAGAGATCATAACTTGAAGTCGGTGGTCTTTA |
| | TTGTATAATTTATTTATTATAAAAATGCATACAACATAAAAGCATCTT |
| | CAGC |
| SEQ ID NO: 1242 | CCCAATTTCACTGGTTTCAAAAACAGAAAAACAGTTCTCTTCCCCG |
| SEQ ID NO: 1243 | CCCAATTTCACTGGTCTACAATGAAAGCAAAACAGTTCTCTTCCCCGC |
| | TCCCCGGTGTGTGAGAGGGGCTTTGATCCTTCTCTGGTTTCCTAGGAA |
| | ACGCGTATGTG |
| SEQ ID NO: 1244 | CCCAATTTCACTGGTCTACAATGAAAGCAAAACAGTTCTCTTCCCCGC |
| | TCCCCGGTGTGTGAGAGGGGCTTTGATCCTTCTC |
| SEQ ID NO: 1245 | CCCAATTTCACTGGTCTACAATGAAAGCAAAACAGTTCTCTTCCCCGC |
| | TCCCCGGTG |
| SEQ ID NO: 1246 | CCCAATTTCACTGGTCTACAATGAAAGCAAAACAGTTCTCTTCCCCG |
| SEQ ID NO: 1247 | CCCAATT |
| SEQ ID NO: 1254 | TATAAAGCTGTTAAAAAATCAGATTGACTTCATTTAGGGTGTTTCTTA |
| | CAGATATCGTTTAAGTTTTCGGTTCTGCTTGTAAACGCTTCAATCGC |
| SEQ ID NO: 1255 | ATTTTAAGTGTTTTAAAAACAGATGCGATTCCGTTAAATCGCGTGTGG |
| | AGCTATGTAAAGTGTATTATAGAACAAATGCGAGTTACGGTTTTTCA |
| | GCTTT |
| SEQ ID NO: 1256 | ATTTTAAGTGTTTCAAAAACAGATGCGATTCCGTTAAATCGCGTGTGG |
| | AGCTATGTAAAGTGTATTATAGAACAAATGCGAGTTACGGTTTTTCA |
| | GCTTT |
| SEQ ID NO: 1257 | GAATGTTCTGTTGCCAATGATAGACGTGTGGGTGGGGTGTTTCATGCT |
| | TTGGGAGGTTGGGGTAGCTCCACAAATGTCACCCAGGTTGTAGCGGA |
| | GTGGT |
| SEQ ID NO: 1264 | AATTTTTGTAATGAAAAAATAGACGGCAAGGGTTATTCTTAAAACTG |
| | CAGTTTTGTAGCTTGGGTGGCATGTTAAGTGTTCTCCTTACAGTCGCA |
| | ACGATGGGAAACAGAAAGTAACGTGTTATCCTCTCCGCCGCCGTGAG |
| | CTCTTTTAACACTAGCTAAGTGGCCGCAGGGCTCTTCTCTTTCCTTTCC |
| | ACTTGGGGC |
| SEQ ID NO: 1265 | ATCATGTTTTATAAAAAAAGACTTAAAGAGGAAAACATTATGGTGCA |
| | ACTTTAGGCTTAAGTGATTCATTGTCACTGTTTGTTTAAACATTGTGT |
| | AACAGAACTTGCAAAGACAGTTAACTCTTGTTTTCCATGTCAAAGGT |
| | CTGAATACTTGCATGATAAAAGTCTGTGTAACTTTCCCTGGTGACATC |
| | TGACTTGCTA |
| SEQ ID NO: 1266 | TCTAAGTAAGTTAAAAGTAGACTTTGGGTATTTACCGAGATCTCTGCA |
| | AACACAGAACTTCTGTTCTCAAGTGTATCATTTTATATCACTAGCTGT |
| | TAAA |
| SEQ ID NO: 1267 | CCTTAAGTTTAAAAAAAGGTATCTGTGCTCTCAAGGCTTTAAACTTTG |
| | TGTTTAAAAGTTTTAGAGCCTTGAGAGCACTTCTCTAAAACTAAAAAT |
| | TGTT |
| SEQ ID NO: 1268 | CCTTTAGAAGTTAAAAAACAGACGTTAAAACTTGTAAATTCTAGTAT |
| | CAGTAGCTTTAAAACACAAACAAAAAATACACTAGAAAAATACAGC |
| | AAGATTA |
| SEQ ID NO: 1269 | CTTAGTAAGTTTAAAAACAGAAAAAAAACCGTGTTGCTACAGCTATA |
| | AACTTCAAACATGCAGTTTATAGCAGTGGGCAACACGTCTCATCTCA |
| | AAAATT |
| SEQ ID NO: 1270 | CCTAAGTCAGTACAAAAACAGAAAGTCCGCGCTCTTACTGCTTGATA |
| | CTTCAACAAGAAGTTACAGCAGTGAGAGCGCTGCTACATTATTTAGA |
| | ACTTCC |
| SEQ ID NO: 1271 | CTGTTACTAGTTTAAAAACAGAAGTTGCTACTCGTTAAAAAGTACTA |
| | AACAAACAAGCTTTTTAAAACTTAGCTTTAAAAAATCAACAATAATT |
| | TTGAAC |
| SEQ ID NO: 1272 | CTTCCGTAAGTAAAAAACAGAACTGTGCTTTAAACTGTTTTTAACAG |
| | AAACGCCTTGCGTCAAAATGAAAGTTCTTAAGTAAAAGCGCTCGTAT |
| | CAAAAT |
| SEQ ID NO: 1275 | CCCAATTTCACTGGTTTCAAAAACAGAAAAACAGTTCTCGTTTCAAA |
| | AACAGATTCCCCGCTCCCCGGTGTGTGAGAGGGGCTTTGATCCTTCTC |
| | TGGTTTCCTAGGAAACGCGTATGTG |
| SEQ ID NO: 1287 | CAATTTCACTGGTTTCAAAAACAGAAAAACAGTTCTCTTCCCCGCTCC |
| | CCGGTGTGTGAGAGGGGCTTTGATCCTTCTCTGGTTTCCTAGGAAACG |
| | CGTATGTG |
| SEQ ID NO: 1288 | ATTTCACTGGTTTCAAAAACAGAAAAACAGTTCTCTTCCCCGCTCCCC |
| | GGTGTGTGAGAGGGGCTTTGATCCTTCTCTGGTTTCCTAGGAAACGCG |
| | TATGTG |
| SEQ ID NO: 1289 | TTCACTGGTTTCAAAAACAGAAAAACAGTTCTCTTCCCCGCTCCCCGG |
| | TGTGTGAGAGGGGCTTTGATCCTTCTCTGGTTTCCTAGGAAACGCGTA |
| | TGTG |

[0166] In some embodiments, an expression cassette comprises an engineered termination sequence (e.g., SEQ ID NO: 60, SEQ ID NO: 1242, SEQ ID NO: 1256, SEQ ID NO: 1257, SEQ ID NO: 1275, or SEQ ID NO: 1287-SEQ ID NO: 1289). The engineered termination sequence may enhance expression of a payload (e.g., a small RNA payload) encoded by the expression cassette. In some embodiments, the engineered termination sequence may have at least about 70%, at least about 75%, at least about 80%, at least about 83%, at least about 85%, at least about 87%, at least about 90%, at least about 91%, at least about 92%, at least about 93%, at least about 94%, at least about 95%, at least about 96% at least about 97%, at least about 98%, at least about 99%, or about 100% sequence identity to SEQ ID NO: 60, SEQ ID NO: 1242, SEQ ID NO: 1256, SEQ ID NO: 1257, SEQ ID NO: 1275, or SEQ ID NO: 1287-SEQ ID NO: 1289.

[0167] In some embodiments, an expression cassette comprises a termination sequence that may enhance expression of a payload (e.g., a small RNA payload) encoded by the expression cassette. In some embodiments, the termination sequence may have at least about 70%, at least about 75%, at least about 80%, at least about 83%, at least about 85%, at least about 87%, at least about 90%, at least about 91%, at least about 92%, at least about 93%, at least about 94%, at least about 95%, at least about 96% at least about 97%, at least about 98%, at least about 99%, or about 100% sequence identity to SEQ ID NO: 60, SEQ ID NO: 771, SEQ ID NO: 930, SEQ ID NO: 1002, SEQ ID NO: 1007, SEQ ID NO: 1017, SEQ ID NO: 1021, SEQ ID NO: 1242, SEQ ID NO: 1243-SEQ ID NO: 1247, SEQ ID NO: 1254, SEQ ID NO: 1255, SEQ ID NO: 1256, SEQ ID NO: 1257, SEQ ID NO: 1264-SEQ ID NO: 1272, SEQ ID NO: 1275, or SEQ ID NO: 1287-SEQ ID NO: 1289.

[0168] In some embodiments, a 3′ box sequence element that may be included in an engineered termination sequence may have at least about 70%, at least about 75%, at least about 80%, at least about 83%, at least about 85%, at least about 87%, at least about 90%, at least about 91%, at least about 92%, at least about 93%, at least about 94%, at least about 95%, at least about 96% at least about 97%, at least about 98%, at least about 99%, or about 100% sequence identity to any one of SEQ ID NO: 40-SEQ ID NO: 42 or SEQ ID NO: 121-SEQ ID NO: 166. In some embodiments, the termination sequence comprises a sequence of SEQ ID NO: 60, SEQ ID NO: 771, SEQ ID NO: 930, SEQ ID NO: 1002, SEQ ID NO: 1007, SEQ ID NO: 1017, SEQ ID NO: 1021, SEQ ID NO: 1242, SEQ ID NO: 1243-SEQ ID NO: 1247, SEQ ID NO: 1254, SEQ ID NO: 1255, SEQ ID NO: 1256, SEQ ID NO: 1257, SEQ ID NO: 1264-SEQ ID NO: 1272, SEQ ID NO: 1275, or SEQ ID NO: 1287-SEQ ID NO: 1289. In some embodiments, the termination sequence is selected from SEQ ID NO: 60, SEQ ID NO: 771, SEQ ID NO: 930, SEQ ID NO: 1002, SEQ ID NO: 1007, SEQ ID NO: 1017, SEQ ID NO: 1021, SEQ ID NO: 1242, SEQ ID NO: 1243-SEQ ID NO: 1247, SEQ ID NO: 1254, SEQ ID NO: 1255, SEQ ID NO: 1256, SEQ ID NO: 1257, SEQ ID NO: 1264-SEQ ID NO: 1272, SEQ ID NO: 1275, or SEQ ID NO: 1287-SEQ ID NO: 1289.

[0169] In some embodiments, a termination sequence for enhanced expression of an RNA payload may have at least about 70%, at least about 75%, at least about 80%, at least about 83%, at least about 85%, at least about 87%, at least about 90%, at least about 91%, at least about 92%, at least about 93%, at least about 94%, at least about 95%, at least about 96% at least about 97%, at least about 98%, at least about 99%, or about 100% sequence identity to SEQ ID NO: 60. In some embodiments, a termination sequence for enhanced expression of an RNA payload may have at least about 70%, at least about 75%, at least about 80%, at least about 83%, at least about 85%, at least about 87%, at least about 90%, at least about 91%, at least about 92%, at least about 93%, at least about 94%, at least about 95%, at least about 96% at least about 97%, at least about 98%, at least about 99%, or about 100% sequence identity to SEQ ID NO: 771. In some embodiments, a termination sequence for enhanced expression of an RNA payload may have at least about 70%, at least about 75%, at least about 80%, at least about 83%, at least about 85%, at least about 87%, at least about 90%, at least about 91%, at least about 92%, at least about 93%, at least about 94%, at least about 95%, at least about 96% at least about 97%, at least about 98%, at least about 99%, or about 100% sequence identity to SEQ ID NO: 930. In some embodiments, a termination sequence for enhanced expression of an RNA payload may have at least about 70%, at least about 75%, at least about 80%, at least about 83%, at least about 85%, at least about 87%, at least about 90%, at least about 91%, at least about 92%, at least about 93%, at least about 94%, at least about 95%, at least about 96% at least about 97%, at least about 98%, at least about 99%, or about 100% sequence identity to SEQ ID NO: 1002. In some embodiments, a termination sequence for enhanced expression of an RNA payload may have at least about 70%, at least about 75%, at least about 80%, at least about 83%, at least about 85%, at least about 87%, at least about 90%, at least about 91%, at least about 92%, at least about 93%, at least about 94%, at least about 95%, at least about 96% at least about 97%, at least about 98%, at least about 99%, or about 100% sequence identity to SEQ ID NO: 1007. In some embodiments, a termination sequence for enhanced expression of an RNA payload may have at least about 70%, at least about 75%, at least about 80%, at least about 83%, at least about 85%, at least about 87%, at least about 90%, at least about 91%, at least about 92%, at least about 93%, at least about 94%, at least about 95%, at least about 96% at least about 97%, at least about 98%, at least about 99%, or about 100% sequence identity to SEQ ID NO: 1017. In some embodiments, a termination sequence for enhanced expression of an RNA payload may have at least about 70%, at least about 75%, at least about 80%, at least about 83%, at least about 85%, at least about 87%, at least about 90%, at least about 91%, at least about 92%, at least about 93%, at least about 94%, at least about 95%, at least about 96% at least about 97%, at least about 98%, at least about 99%, or about 100% sequence identity to SEQ ID NO: 1021. In some embodiments, a termination sequence for enhanced expression of an RNA payload may have at least about 70%, at least about 75%, at least about 80%, at least about 83%, at least about 85%, at least about 87%, at least about 90%, at least about 91%, at least about 92%, at least about 93%, at least about 94%, at least about 95%, at least about 96% at least about 97%, at least about 98%, at least about 99%, or about 100% sequence identity to SEQ ID NO: 1242. In some embodiments, a termination sequence for enhanced expression of an RNA payload may have at least about 70%, at least about 75%, at least about 80%, at least about 83%, at least about 85%, at least about 87%, at least about 90%, at least about 91%, at least about 92%, at least about 93%, at least about 94%, at least about 95%, at least about 96% at least about 97%, at least about 98%, at least about 99%, or about 100% sequence identity to SEQ ID NO: 1254. In some embodiments, a termination sequence for enhanced expression of an RNA payload may have at least about 70%, at least about 75%, at least about 80%, at least about 83%, at least about 85%, at least about 87%, at least about 90%, at least about 91%, at least about 92%, at least about 93%, at least about 94%, at least about 95%, at least about 96% at least about 97%, at least about 98%, at least about 99%, or about 100% sequence identity to SEQ ID NO: 1255. In some embodiments, a termination sequence for enhanced expression of an RNA payload may have at least about 70%, at least about 75%, at least about 80%, at least about 83%, at least about 85%, at least about 87%, at least about 90%, at least about 91%, at least about 92%, at least about 93%, at least about 94%, at least about 95%, at least about 96% at least about 97%, at least about 98%, at least about 99%, or about 100% sequence identity to SEQ ID NO: 1257. In some embodiments, a termination sequence for enhanced expression of an RNA payload may have at least about 70%, at least about 75%, at least about 80%, at least about 83%, at least about 85%, at least about 87%, at least about 90%, at least about 91%, at least about 92%, at least about 93%, at least about 94%, at least about 95%, at least about 96% at least about 97%, at least about 98%, at least about 99%, or about 100% sequence identity to SEQ ID NO: 1264. In some embodiments, a termination sequence for enhanced expression of an RNA payload may have at least about 70%, at least about 75%, at least about 80%, at least about 83%, at least about 85%, at least about 87%, at least about 90%, at least about 91%, at least about 92%, at least about 93%, at least about 94%, at least about 95%, at least about 96% at least about 97%, at least about 98%, at least about 99%, or about 100% sequence identity to SEQ ID NO: 1265. In some embodiments, a termination sequence for enhanced expression of an RNA payload may have at least about 70%, at least about 75%, at least about 80%, at least about 83%, at least about 85%, at least about 87%, at least about 90%, at least about 91%, at least about 92%, at least about 93%, at least about 94%, at least about 95%, at least about 96% at least about 97%, at least about 98%, at least about 99%, or about 100% sequence identity to SEQ ID NO: 1269.

[0170] In some embodiments, a termination sequence, also referred to as a terminator, may enhance transcription of an RNA payload. The termination sequence may be positioned downstream of the payload sequence. Additional exemplary termination sequences of the present disclosure are provided in TABLE 7.

TABLE 7
Additional Exemplary Termination Sequences

| SEQ ID NO | Sequence |
|---|---|
| SEQ ID NO: 708 | ACATTTGAATTTTTTCTTAAAAAAAAAAAAAAAAAAAAAAAAAAAAAAGGAGACACACC |
| | ATCTTCCATGGACTGAATATCTGTGTTTCTCCAGAATCCAT |
| SEQ ID NO: 709 | TATTTTAAGTGTTTTAAAAACAGATGCGATTCCGTTAAATCGCGTGTGGAGCTATGTAAAG |
| | TGTATTATAGAACAAATGCGAGTTACGGTTTTTCAGCTT |
| SEQ ID NO: 710 | ACTTTCTGGAGTTTCAAAAACAGACCGTACGCCAAGGGTCATGTCTTTTTTCGTATTGGTTT |
| | GTGTCTTAGTTGTTAATCCTACAGTGGAGGCCTGGGGA |
| SEQ ID NO: 711 | ACCTGACATAACGGGGTTCAAGACTGACAACGCCTCACGCCCACCCGAAAACGTTTACAT |
| | GGCTTCCTTGTCTCTTTTTTTTTCTGTCCTAAAGTCGCCT |
| SEQ ID NO: 712 | ACTTTCTGGAGTTTCTAAAAGTAGACTGTACGCTAAGGGTCATATCTTTTTTTGTTTTGGTT |
| | TGTGTCTTGGTTGGCGTCTTAAATGTTAATCCTACAGT |
| SEQ ID NO: 713 | GTTTCACTCTTGTTGCCCAGGCTGGAGTGCAATGGTGCAATCCCGGCTCACTGCAACCTCC |
| | ACCTCCCGGTTCAAGCGATTCTCCTGCCTCAGCCTCCTG |
| SEQ ID NO: 714 | TTTATAAATAAAAAAAATTTTATAATGATGCATCTTTACAAAGCTAACATGTTTAGTTTAAC |
| | AATTTTATTAAACATCACTCAAAGGGTGAGTCAAATGT |
| SEQ ID NO: 715 | TCTTTACTGTTATATGTTAGGCGAAATATTACGCGTTTGGAGTAAGTGGTGCTTTTTGTAAC |
| | TGAAAAGAGATTCTGTGTGTGTTTTTTTTTTTTTTTAG |
| SEQ ID NO: 716 | CTTCCATCTCAAGAAGCTGCCAGCCTGGGCAAAATGGTAAAACCCCATCTCTACAAAAAA |
| | ATAAAAAAAATTAGCTGGCATGGTGGCACATGCCTGTGGT |
| SEQ ID NO: 717 | CCTCCGCCTCCCGGGTTCAAGCAATTCTCCTGCCTCAGCCTCCCAAGTAGCTGGGGTTACA |
| | GGCATGCGCCACCACACCTGGGTAATTTTTGTATTTTTT |
| SEQ ID NO: 718 | CCTCACTAAAACAACAACAACAACAACAAAAGACAAAATTTGAATTCCAGAAATAGTTAT |
| | TGCAGCAACAAGTCAGTCTCCCTGCTGGAAACACCTATCA |
| SEQ ID NO: 719 | AAGAAAAACCCATTTTCCACAAACACAAAATCTCAACAATGAGAAAACAAACAACTCAAT |
| | AAAAAACGGGCTAAAGCTCTGAACCAACACTTCGCCAAAG |
| SEQ ID NO: 720 | AAAAAAAAATTCTTTTAAAAAATTAAAAAGTGAAAATGCAGTTACTATAAAGGAATGACA |
| | ATTTTGTTTGCAGCAGATTAAATGAAACAAGAACTTGCAT |
| SEQ ID NO: 721 | TGGTTAAAAAAAAAAGAAAAAAGAAAGCCTATGTGAATGTCTGCATATGATCCTTGAAAT |
| | CGGGGATCCAATTACTTTTGTGATTCCCAGAACACAGGCA |
| SEQ ID NO: 722 | GGAGGTTGTAGTGCAAAAAGCAGTTTGTCTACCAAGTGATACTTTCAGCTTTTACAAATGC |
| | TGAACAATATCCGTGGTGTGTTTTCATGTCACCTCCTCT |
| SEQ ID NO: 723 | AGAAAATTTCCACATATTTCAACATGTATCTTGCAAAAAGCCTATGAACTTCAATTTGTATT |
| | CATACTTGTAAAATTATGTTCACACATTATTTCTTGAG |
| SEQ ID NO: 724 | GGTTGTTGTCGTTTTAAAAGTGGATTTTGTTTGCTGTGGAAGCATATACAAGGCGTTAGTAT |
| | AAACTAATAAACAGGTCTTTGTTCCCATCTGTAACTTA |
| SEQ ID NO: 725 | GTGCTTCTGTGGTGCGAATAGTAGGTGAGCCGTAAGTGTTTTTGTAACTCAGGGTGCGGGC |
| | TCGTGTTTTGTGGCTGTGTTCTGTCCGGTCAGTTGTTTC |
| SEQ ID NO: 726 | CCTAACATAACGGGGTTCAAAACTGACATCGCCTCACGCCTACCCGAAAACGTTTACGTGG |
| | CTTCCTTGTCTCTTTGTTTTTTCTGTCCTAAAGTCGCCT |
| SEQ ID NO: 727 | GGTGCTTCTGTGGTGCGAATAGTAGGTGAGCCGTAAGTGTTTTTGTAATTCAGGGTGCGGG |
| | CTCGTGTTTTGTGGCTGTGTTCTGTCCGGTCAGTTGTTT |
| SEQ ID NO: 728 | ATTTTTGTAGTTTAAAGAACAGTCTGCACGGCGAGGGTTACTTGTTTTTTTTACTGGCTTGT |
| | GCTTTACTCTTAATCGTTTCTCTCACAGTCGGAGGTTG |
| SEQ ID NO: 729 | GGAGGTTGTAGTGCAAAAAGCAGTTTGTGTACCAAGTGATACTTTCAGCTTTTACAAATGC |
| | TGAGCAATATCCATGGTGTGTTTTCATGTCACCTCCTCT |
| SEQ ID NO: 730 | GGTGTTCGTGCTACCCCGGGGCTGGGTTCGCGCACGCTCCTGACCTGCCTTGGCTCACGGC |
| | CAACGCGGATATCGCCGCCAGAGACCCTTCGCCGCCCTC |
| SEQ ID NO: 731 | AGATACTGCAGTGCAAAACGTGAGCTCTACGCGAAGGGCTACTCTTAGTTTCTATGGGTTT |
| | GTAGCTTTGACGGCATGTTAAGTGTCGTCCTTACTGTCT |
| SEQ ID NO: 732 | GGATTGCTGTCGTTTTAAAAGTGGATTTTGTTTGCTGTGGAAGCATATACAACGCGTTAGT |
| | ATAAACTAATAAACAGGTCTTTGTTCCCATCTGTCACTT |
| SEQ ID NO: 733 | GCGCTTTTGTGGTGCGAATAGTAGATGAGCCGTAAGTGTTTTTGTAATTCAGGGTGCGGGC |
| | TCGTGTTTTGTGGCTGTGTTCTGTCCGGTCAGTTGTTTC |
| SEQ ID NO: 734 | GGTTGTTGTCGTTCTAAAAGTGGATTTTGTTTGCTGTGGAAGCATATATAAGGCGTTAGTAT |
| | AAACTAATAAACAGGTCTTTGTTCCCATCTGTAACTTA |
| SEQ ID NO: 735 | CAGGGGATTAAAATTTAATGTTCAAAACAGAAGAAGGAAAAAAAAACAGTCTGTCTATGT |
| | GGGATGGGATACAAAAGAGTGGGATAAGAATTATCTTTTG |
| SEQ ID NO: 736 | CCCCCACAAAAAGAAAAAAATGCATTCTAAAAAAAAACTAAAGAATGCTTTAGGAAGTAT |
| | TGACTGGCAGTAGTGTACAGCATGAATAGGATCAAGGCAA |
| SEQ ID NO: 737 | CTGAACTTAAAAAACAAAAGTTGATTGAAAAAAAATTTTTTTTTTTTTTTGAGATGGAGTCT |
| | TGCTGTCGCCCAGGCTGGAGGGCAGTGGCACGATCTTG |
| SEQ ID NO: 738 | AAGTAAATTAAAAAAAAAAAAACTATTAACAGAGTAAACAGACAACATAAAGAATGAGA |
| | GAAAATATTTGCAAACTGTGCATCTGAGAAGGGTCTAATAT |
| SEQ ID NO: 739 | ACTTAGACAATGCTGAGAAATGAGAAGGTATGGCTGGCTTGGCTTTTAAGCTGAAACTTTT |
| | ACTACAGGCCTGGGAGTTATGACAGCTGGAGTCTGAATA |
| SEQ ID NO: 740 | TTTTTTGTCTGTTTGTTTTTAGGTCCTGCTTGGGCAGGGCCAAGTAAAAAAGAAAAAAGAA |
| | AAAAGAAAAAAACCACAAAAGGTCATCGAATTAGGGTCA |
| SEQ ID NO: 741 | CATGCAAAAAATTATATTATTATGTAATTATTATTAACTAATGTCCAATTTTCACAAAACAT |
| | GTTTAAAAATTTTCTCTAGACATTTGTCAGGGAGTAGT |
| SEQ ID NO: 742 | CCCCCCACGGGATATGGGATATGGAGAGACAACTGTAACTTGTTTCCATATCTGCTTATCT |
| | CAACCAGAGGACCTTGTACAGTACCAGAACCCAATAGGT |
| SEQ ID NO: 743 | CCCTGAAAAAAAAATTAATTTAAAGTTTAAAAATATTTTAATAAAATAAAATAAGTCCAG |
| | ACTTACCTGAGAAGACATAGCAAGGACCTGTTCAAGATAA |
| SEQ ID NO: 744 | GGATGGAAAATGATTGTGTAATTGGTACGAGGTTTCCTTTGTGATGATTAAAATGTTCTGG |
| | AACTAGATAGTGGTGTCAGTTACACAATATTGTGAATGC |
| SEQ ID NO: 745 | GTGTTAGATGATGTTAAGCACTAGGCAGAATAATAAATTTGGGAAGAGGTAGAGGAAAAA |
| | TGTAGGTTACAGTATGGGCTAAGTTGTTGTAACAAAGTGT |
| SEQ ID NO: 746 | ATCCAGCACTCCCCAGTAGTCCTTTCATAAAAGAGCCCTGCCATTCCCAAGTCCATTGTCA |
| | TGATTTATTGCTTGCTTGTTGGGATTTCACCATCTAGAG |
| SEQ ID NO: 747 | CGGGGGAAAAAAAAAAAAATGAAAGAAGCACATGTCTTATTCATATGTAAAATGCCTAGA |
| | GTAACAGACACTCAATAGTCTATTTAGGTATAGATTACTC |
| SEQ ID NO: 748 | AATAAAAAGTTTTTTAAAAAAACTTTATTTAGGGCAGGCGCAGTGGCTCATGCCTGTAATC |
| | CCAGCACTTTGGGAGGCTGAGGCAGGTGGATCCCCTGAG |
| SEQ ID NO: 749 | GCCTGCAAATGTTTGATAGATACTCTAAAATTACTCTCTAGTGAGGCTGTACCAATCAACA |
| | CCTCATCTCAGCAGTGCGTTGATGCTCCTGTTTCCCCAA |
| SEQ ID NO: 750 | TGTGTGTGTGTTTGTGTGTCTAGTAGTGTTTACATGCATTCTTCCCTTGGGGATATTTTTTTT |
| | TTTTTTTTTTTGAGACGGAGTTTTTCTCTTGTTGCCC |
| SEQ ID NO: 751 | AATGATTAAAAAAAAAAGTCAAACACATTATTGAAAGAAGCAAGTTAAAATTGAAGTTAA |
| | AAACTGAATATGTGGGCTGGGCATGGTGGCTCACACCTGT |
| SEQ ID NO: 752 | CCACATCCATTTCCTGCCTTGGTCAGAACTGGCTCCGGAATGGGACAGGGCTGCCTGTGGC |
| | TCCAGCTGGGGGAGGCTGAGGTGAATAAAGACAGTGATG |
| SEQ ID NO: 753 | ACCTCAGGGCAAGGAATGTTTTCTGTCGCAAGATCCTAAATAACAGACATTCAAAGGAAA |
| | GGTATGAGTTGGAACATGTTAAACTAAAAGTTGCTGCACA |
| SEQ ID NO: 754 | AAAATAATAATAATAAAAATTTGTTTTAGAAAGTGCCCAAACCTTCATCCTTTCCTATCAA |
| | GAAGGAGAGGACTTCCCTGCCAGAGTTCCAAGGCAGGGT |
| SEQ ID NO: 755 | CTGAATAAAAAATAAAGTTTAAAAGGGTTAGTGGATGTAAAATTAATATATAAAGGTCAG |
| | TCATATTTCCATATCTCAGCAGCAAATAACTGGAAAACAT |
| SEQ ID NO: 756 | GAAAAAAAAAAAAAAAAGATCTTACAAGTATAATCATAATATTCTTCAAAATTATAAATA |
| | CTTACACATATAAATTATGAACATGTATGCATATATGAGA |
| SEQ ID NO: 757 | CACTGAATTTTATAGTTAAAAAGAAGAAAAAACTTAGAGACACAGAATCAAAGACCTAAG |
| | AATACCAGAGCACACCAGCAGGATAAATACCAAAAACAAA |
| SEQ ID NO: 758 | ATATATTGACAATGTTACTTCTTTGTTTAGGTTAAGGCATTAAAAATTTATTCATAAAATAA |
| | ATCAATCTATTCATAAATAGAAATAGTCTTTTTAGAAG |
| SEQ ID NO: 759 | ATGAAAACCTGTTTTCATAGACTTATCAGTTCAAACAGCAGTAATTCGTAAATAAACTAGT |
| | ACTTTGTGGTTAAACCAGTAGAGGGTGCACAAGACGCGT |
| SEQ ID NO: 760 | TACCCCACCTCGCCTCCCACCACCCCGTCCAAAAAAAAAAAGATTAAAGAGAACAGAATG |
| | GACTAGGGTCCAAGCTGGTGACTGGGAGTTTATGTAATGC |
| SEQ ID NO: 761 | CCTACCCCTTTGGACTTACCAAACATCTCTGTAATCCTTTAATGTACAAGTAATAGACATCT |
| | ACATCACTCCAAACAACACTCTACCTGCTCCAGGGGGA |
| SEQ ID NO: 762 | TAAAACACAACAAACAAACAATCAAACAAGAAAAAACCACAGAGGCTGTTGAACCTTTTA |
| | GTCAGAACATATAATCTCCAATGTATCATAGTTTCCACAA |
| SEQ ID NO: 763 | TTTTTTTTTTTAAGTTTACACGCTGTTTAATTCAACCACTGTTCTGGGTTTTATTTGTTTGTTT |
| | TTCAAGAAGGAAGTATAAAATCTTTATGTTATAAAT |
| SEQ ID NO: 764 | TGAAAAATAAAAAATAAAGAATATATATATATATATATACACACATACACATATATTTGA |
| | AGATCAAAAGAAATATGTAAATAATTCTTTTCAGCATATA |
| SEQ ID NO: 765 | GGCAAAAAAAGAAAACGAAACACTACCATAAAACCTTGGTAACTTTTAAAATAAATCAAC |
| | ATTCTATCTCCCCAGCTCAAGCTAAAAGGCTTTATTTCTT |
| SEQ ID NO: 766 | AAAAAAAAGAAGGAAAAAAATGCTTTTGGCTGAGTGTGGTGGCTCACGCCTGTAATCCCA |
| | GCACTTTGGGAGGCCGAGGCAAGCGGATCGCTTGAGCCCA |
| SEQ ID NO: 767 | CTCACACACACACACACATACTCAAATGGGGCCTTGAGCACAGGAAAGGAGAGGCAACTA |
| | TAACTGAGCCCACAAATGAAGCCTCTTAGAGCCTCCTGTC |
| SEQ ID NO: 768 | GGGTCAGGGGGGAAGAATTCCCTCTGTGATAGCCCCATTTAGAATAGTGTTTCTGCCTATC |
| | TATGTATATTGCTGTTTTTCCTCCTTTAGTAAAGATGGA |
| SEQ ID NO: 769 | GGTAGTCTGAGTTTGGGCTTGGCCCAGGGTGGGGAAAAGCCCTTGTCCTGGGGCAGTTAAT |
| | GTGCAGGTTTCATGATGGAGCCTGGAGGGTGTTGACTGG |
| SEQ ID NO: 770 | CCCCCAAATGTTTCTATATTAAAAAAATAATGAGAGGCAATTTGTTTTTTGTAGTTACTTAG |
| | CTAGAAAAGGAAAAATATTTTAACCTGTATTTTTTTTT |
| SEQ ID NO: 771 | CTATTTAAAAAAAAAAAAAAAAAAAAGGAAGAAGAAAGGAAAAAAAAACGGTTAAGGCC |
| | AGGAGGAAGCATCTCAGTGGCAGGTCTTAGCCTCATGCCCA |
| SEQ ID NO: 772 | ATAAATATGACACATTACCAACAGAATGAAGGAGAAATACCATATGATAACCTCAATAGA |
| | TGGCCAAAAATTTTTTTGATAAATTTAACATCTCTTCATG |
| SEQ ID NO: 773 | TGTAACAACAACAACGAAAAAAATATATATATATATTTATCAGCCCTAGGAAATCATGTGT |
| | TTTACTACATTAGCAGTAACTCTCCATCTTTTCCTCCCT |
| SEQ ID NO: 774 | CCCAAAAAAGAACGGAAAGGAAAAAAGAAAGGAATGAAAAGGAAGGGAGGAAGGGAAA |
| | GAAAAAGAAAGAGAGGGAGGAGGGCGGGAGAGAGGAAAGGAA |
| SEQ ID NO: 775 | CTAAATTAAAAAAAATACAATAGATAGCATTCAATATAATAACTGCTACTGTTATTATAAT |
| | TGTCACAACTGCTGTTACCTCAACTAATTCATAAAATAG |
| SEQ ID NO: 776 | CTGAATTATTAGGTTGGTGCAAAAGTAATTGCAATTATAAAAAAAAAAAAGAACCTTTCCT |
| | GCTTTTTAAGCAGACAACAATGCATTCCCCTCTGCTGCC |
| SEQ ID NO: 777 | AAAAAAAAAAAAAGAAAAAAAGAAAAAAATAGGAAGAGATATAATCCCACCATACATAC |
| | ATTTAGGATGACCCAGGATTTCCCAGATTAACAAGGTCGAT |
| SEQ ID NO: 778 | CTAAAAAATAAAAATTAAAAAATAAATAAATAAAAATTCCACTGAACTAAAAACAAACAA |
| | AAAAATCCAGAAGGCAAGAATTAGCACTTTGAGAATTGCA |
| SEQ ID NO: 779 | CCACCGCTCCCCTCAAACTCCCATGTTAAAAAAAACTTTTTTTTTTTTTTATGAGTGAATAG |
| | GTAGTTGGATTTTTTTTTTTTTTTTAAGAGACGGGGTG |
| SEQ ID NO: 780 | TAGAAGGGAAGAACACTGCAGAGTAGCTTGCACACCTAGTATCTGTGATATGCTGGTTTTC |
| | CTATTCCTTGAACTACCTTGAAGTTCCTGGTCTGCGGAC |
| SEQ ID NO: 781 | GGGTTTTAATTTTTAATCTATGCATGTTTTTGCTAAACTTTGAGAAATAATTTCATACTACTT |
| | TGGTCATCAAAGACCAAACTTGAATTTTTCCCTTTGT |
| SEQ ID NO: 782 | CCCCACCCCCCACAAAAAGTGAATAAAAAGAAAGGAAAAAGAAAACAAATAAATAAAAT |
| | ATATGTATACCCACAGCAAGGTCTGAGGACAGTATTCAAAC |
| SEQ ID NO: 783 | TTTTATTTTTTCAATATTAAAATGAAATTTAAAACATAAAAAATAAAAATATTGATTATTAT |
| | AAATGGGATATGAGACCTTTAAAACATCACTTTTGTGC |
| SEQ ID NO: 784 | CCCAAAAAATATTAAAAAATAAAAAATAAAAACAATATTGAGGATTTTCTAAAATTTTTTT |
| | GCTACCTCTAACAATGTTGCAATGTAAATCCTTGTATAT |
| SEQ ID NO: 785 | TTGGTACCTGTGGCTTAGTCACCAATAGAAATCAAGATAGTTTCATATAACATTATAGTTA |
| | CCCCTGATATCTCAAAATATTTGCCCTGATCACTATTGC |
| SEQ ID NO: 786 | CCTCCCACACACATAAATTCTCACCAATCTTGAGGGAATGTTAAAATAAGATGTGCTTTGA |
| | TTGGCTGATATTAAGGCATATTAGAAATGAAAGAACTGT |
| SEQ ID NO: 787 | CTGAACTTAACATTAAAAACAAATTAAAAAATGAAAAGATAGGGATGTAAAAGTATCCAC |
| | ATGAGCTGATACCAAGGAGTTGGAGCCAGGCTCCAGGGAA |
| SEQ ID NO: 788 | ACTATTGTTATAATGAACACATTACCAGAGCTCATATTTTGTTTATTCTCAACCTTTTTTCTT |
| | TCATTACAGTGTATGAACTAAGCAATGGACAAAACTC |
| SEQ ID NO: 789 | TACAAATAAAATAAATAAATAAATATAAAATAGAAATTTGGCCAGGTGCAGTGCCTCATC |
| | CTGTAATTCCAGCACTTTGGGAGCCAAGACAGGAGGATCA |
| SEQ ID NO: 790 | AGATAGAAGTTTACCTATGTAACCTGCACTTGTACCCTTGAACTTAAAAGTTACAAAGAAA |
| | AAGTATTACTAGCTTCTCTGTTAGGTATAGAGAGGGACT |
| SEQ ID NO: 791 | CAGAAAAAATTCCAAAAAGAAAAAACCTACTAGCAGTTAAGGAGGAAAAAAATCAGCAA |
| | TTCTACCAGATAAGTAAGGTTAACATTTATTTGATCTTCAG |
| SEQ ID NO: 792 | ATGAAAACCTGCTAAAAATAAGAAAAGTAATCAATTTTGTATCTTTTAAAAAATGTAATGA |
| | TAATAATAATAAAAGTCAGAAAAAAGAAAAGGGAAAACT |
| SEQ ID NO: 793 | TCTATATATTATTTTATATATAAAAGAATAATTAAGATTATTAACATAATAATTTTTAAAAA |
| | GTATTTAGGTTCCAGTTTTATCTATTCTGAATAATGCT |
| SEQ ID NO: 794 | GTAAATAAAAGGAAAAAATGAGCCAACAACCTGAACAGACACCTTACCAAAGAAGATAT |
| | ACAGATGGCAACTGAGCATATGAAAAGATGCTCCACATATA |
| SEQ ID NO: 795 | GAAAAAAAAAAAAGAAGAACAACACTAGAAATGGTAAATAAGAGGGTAAAAATGAAATA |
| | CACTTTTTCTTATTTTGAGTCTCTTTAAAAAATCATTGGCT |
| SEQ ID NO: 796 | ATAGAATATAGCTATATCACTGACATGGATGCACAAGCTACTGTTTTAAAATAAGTTTATC |
| | AATGCTAGTGTAGCAATTTGGTCACGTAAATGCATTTTT |
| SEQ ID NO: 797 | TCTTCACAGCCTAAGAACAGGCTTCCTCTGTGTAAAGAAATAAAAGAAAACACAAGCATG |
| | GGCAGAAGTCAGTAGAACAATTAGGAGGCTCTTACAGTAG |
| SEQ ID NO: 798 | CAGGTAAATCTATTACAACATTTAGGGCCAGGTGCGGTGGCTCATGCCTGTGATCCCAGCA |
| | CTTTGGGAGGCCAAGGTGGGTGGATCACGAGTTCAGGGG |
| SEQ ID NO: 799 | ACCCATTAACTCGTCATTTACATTAGGTATATCTCCTAATGCTATCCCTCCCCCCTCCCCCC |
| | ACCCCATGACAGGCCCCGATGTGTGATGTTCCCCACCC |
| SEQ ID NO: 800 | TCGGGGGAATAAATTTTTAAAAAAAGCAAAATGAGTTTCTTCAGAATATCACATATACCTG |
| | TTTTTCAAATGTAAATACATCTTAAAATGAATTATCAGG |
| SEQ ID NO: 801 | CTTAACTATCTCAGGTTTAAAAAAAGCTGACAATTTTTTTTTAAGTCTCCAGATTCTGCAGC |
| | TAAGTAAGTACTTGAAGGGAAAGGGTGTCAGTCTCCTC |
| SEQ ID NO: 802 | AAAATAGAATATAGCTATATCACTGACATGGATGCACAAGCTACTGTTTTAAAATAAGTTT |
| | ATCAATGCTAGTGTAGCAATTTGGTCATGTAAATGCATT |
| SEQ ID NO: 803 | CAGTCACTTTCAATTGCCAACCTTGTTTTAAAAAAGAAGCATCAGCACTCCCTGAAATCCC |
| | TCTCCGTTTTTCTTACTCTATTCTTATGCTATGCATCCC |
| SEQ ID NO: 804 | TAGTTAAATAAATAAGAAAATAAACAGATCGAGCTGGACCACTATTTTGGCCCCTTTTCCT |
| | TCTCATGTGTCTGGAATACAAATGCCTAGAGGTAAAACT |
| SEQ ID NO: 805 | ACTAAAAAAATGGTTTATAACAACAAATGCCAGTTAATATATAAAGCATAAAGTAATGTTT |
| | GTATGCCTTGAAATGAGTATAATTGATTAAACAAGTATA |
| SEQ ID NO: 806 | TACTCCTACACCATGCAAAAGTTAAAAAAAGAAAACACAAAAAACATACAAAACGTGTTA |
| | ATTGATTACTTATCAGTGAGGCTTCTAGACAGTAGGCTAT |
| SEQ ID NO: 807 | ATGTTTTTGATATAAAAAAAGAAACTTCATGTCTTCAAATCTTTGGGGATTCCTAAAATAT |
| | CTATTTACTAATTGCATGCTATTATTTTTATTCAAAACC |
| SEQ ID NO: 808 | ACTAAACTTTGTTGGTAAAAAAAATAAAAATTAATGATAAATAAAAAATAAACTGCTGAC |
| | TTAAGTTGATTTATAATTCTGTATCTCATAAAATTGGAAT |
| SEQ ID NO: 809 | AATGGTCTGACTCTGTCACCCAGGCTGGAGTGCAGTGGTATAGTCACAGCTCACCACAACC |
| | TCAACCTCCCAGGCTCAGGTGATCCTCCCACTTTAGCCT |
| SEQ ID NO: 810 | AGACTGTGATATCAATCTCTGATATTATGATATCACAGTTATCATAATTTATATGTCTGATA |
| | TAAATTTTTAAAAGATTAAAAAAACCATTGCTTTCGGC |
| SEQ ID NO: 811 | ATGAAAACCCACTTTTCCATGTCAAAAAAAAAGGTAAAAAAAAAAGGCAGCCGGGCATGG |
| | TGGCTCATCCTGTAATCCCAGCACTTTGGGAGGCCGAGGC |
| SEQ ID NO: 812 | CACGGACTAATAAAAAAAAATTGTTAAAAGTAACCCCATATTTTCAATCTTTTAAAAATGT |
| | CCATTATTGATCCTATATATCTCCATAGCTTCCATCTTT |
| SEQ ID NO: 813 | AGTATAAAGAAGAAGAAGAAGGGGGCGAGGGGGAAACAATGGCTGGGTGTGGTGGGTCA |
| | CACCTGTAATCCCAGCAGTTTGGGAGGCCGAGGCGGGTGGA |
| SEQ ID NO: 814 | AAGGAAAGCCTCTTTTCCACAAAAAAGGGGGTAAAAAAACAAGAATAACATCAGCTACCT |
| | TTGTTGCGTTAATTTTGTAGATTAAGTGAAATAAACATGG |
| SEQ ID NO: 815 | AAATATATATATATATGCAGTATTAGAGCAAAGGACCAATAAGAGATAAAAACTAACTGA |
| | ACTACCTCTTAGTGCCTGGAATTTACCTTTTCCTGACTTA |
| SEQ ID NO: 816 | TGATTTAAAAAATTTAAAATTTTTAAATATAAAAATAAAAATAAAATATTTAGGATATTAA |
| | TACGATACAAGGTAGACTTCAAGCCAAAACCATTAGCTA |
| SEQ ID NO: 817 | AAAAAAAAAAAAGCAAGAAAAGAAACAGGCTTTTGCTGAGGATCCACTCCTGCTTCCCCT |
| | GTTGGGCCATTCCTGTTGTGTTGTGTTTGATGTTAGAAAC |
| SEQ ID NO: 818 | TTGCCCCTCAAAAAGAGTATGTATGGTGGGCCCTCTGTATCCACAGATTCTGCATCTGCAG |
| | ATTCAACCAACCTCATTGAAAACATTCAGGAAAAAAACA |
| SEQ ID NO: 819 | TGGGCAATATAGCGAGACCTCGTCTCTACAAAAAATACAAAAAAATTAGCCAGGCGTGGT |
| | GGCGCCTACCTGTATTCCACAGTGTATATTTGCCACATTT |
| SEQ ID NO: 820 | TGATGCTATGTGTTTTTAAAAAATTTTTTGTTTATTTATTTTTTCAGACGGAGCTTCACTCTT |
| | GTTGCCCAAGCTGGAGTACAGTAGCACGATCTCAGCT |
| SEQ ID NO: 821 | TGGCAAAAAAAAAGTCTTAAAAAATGAAAAGGAAGGGTATATGGGAGAAAATTAGGCAG |
| | TACAGGTGAGTAGGGAGAAGATCCTGCAAGGCCTTACAGGT |
| SEQ ID NO: 822 | TTTGACCCATTACCCATCTAAGTTAGATGCTTTTTTAAATGTTTTTTAATTTTTAAATTTTTA |
| | ATTTTTTTCATTATTTATTTTTTATTTTTGAGACGGA |
| SEQ ID NO: 823 | GAAAAAAAAAAGAAGAAAAGAAAAAAAAAAAGAAAAGACAAGACAAGACCAAGTTCTG |
| | AGAGTGCTTGAAGAAGCGGTACTAGGAGAAGACTGCACTGCC |
| SEQ ID NO: 824 | CTCCACAGAAAATTTTAAATCATGTCAATTTCTTTTTTTTTTTTTTTTTTAATCCTCTTGGGA |
| | TTTCAGTTTACATTAAGTAAAATCTATAGATCAATTT |
| SEQ ID NO: 825 | ACCTGGTTCATCTCATTGGGACTGGTTGGATAGTGGGTGTAGCCCATGGAGGGTGAGCCAA |
| | AGCAGGGTGGGGCATCGCCTACCTGGGAAGTGCAAGGGG |
| SEQ ID NO: 826 | AAAAAAATGCTTTGCATCCCACAAGAACTAGATATAGACAAGTGCCATTTTTGCTACACAG |
| | AATGCTTTAAAAAAAAAAATGGTGGGAAATAGAGAAGGG |
| SEQ ID NO: 827 | GAAAAATCTGGCCATTTAGAGTGTCTAAAGCAATGGAAGACCTTGGCGTTACTGCTTGATT |
| | GCCTTGATTTATAGAACCTGCCTTAATTTGACTAAGAAA |
| SEQ ID NO: 828 | CCAAAAAGAAAATACAAATCTTACCTGAAGATCTTCTGAGAATATGATAAGTAGGAAAGT |
| | ACTTAACCTAGAGTAGGAAAGTATTAATAAAAGAATTAGG |
| SEQ ID NO: 829 | TAAAAAGAAAAATAGTAGGCTAATAAGGGAAGGCTATTCAGATGTTGTATTAGTTTTGAA |
| | CTATATCTTGTAGAATGTGATCAACCAAGGCAAAGCTGAC |
| SEQ ID NO: 830 | ACCCCCGCACCTCCGCAAAAAAGCTACCACTTGTAGCTGGGTGCAGTGGCTCACGCCTGTA |
| | ATCCCAACACTTTGGGGAGGCCAAGGCACAAGGATCACT |
| SEQ ID NO: 831 | CCTACCCCAAAAAAAGAAAGAAAAACCATAAGCCTGTGTGTGTGCTCCCTGGACCCTTCTT |
| | TTCCGCAAAACCTTGCTGAAATCAGAGACAAGGACCTTC |
| SEQ ID NO: 832 | GCAAAAAAAAAAAAAAAAATGCATACATATAATTTATAAGTCCAACATGCTCTGTTTTCTT |
| | AAGTCAAATAAAATAGAAGCCATAGTTGTTATGAGTAGA |
| SEQ ID NO: 833 | GTAATTGGGTAACAATTTTCCATAAATTGAAATGAGAAATGTTAGAAACACACAACCAGTT |
| | AACAGTAAGTGGCACAACAAAAACAGCAAAAGCCCACAT |
| SEQ ID NO: 834 | GAAGAGGCATCTGTGCCCAGCTCGTGGCCTGTTCTTTGCACTTGCGGTGGAGATCCTCTTCT |
| | CCCACAGCTGTCCCCCCGGGGCCTGCTCCCAGGTGGGG |
| SEQ ID NO: 835 | CTGAATAAAAATAAATAAATAAAAAATAAATGTAAAAAAAAAAAAGACCATCATAGTACT |
| | GTGAAGAGCCTGGTCATCATCCTTTTTTATGTAAGGAGTA |
| SEQ ID NO: 836 | TCCCCAACAAAACAAGAGAGAAATAGTCCTCATTTACTATTTAATAACCCAGTGTCCTTAA |
| | ACAATCTTAAACATGCTGAGAAGTTTAAAGAATAGTACA |
| SEQ ID NO: 837 | CCCACAACCCACCAAAAAAGTATTGAGGATATAGATACAACCAATTTCAAGCTCAAACTG |
| | AGATCAATAGTGTCATAACAATTCTACTGGTTTACATAAA |
| SEQ ID NO: 838 | AAAAAGTAATTTTTTTTCTTAATATACAAAATAAAAATAAATAATTTCTACCCTGTTTAAAA |
| | ATCTCACCTCCAGATCCTCCCCAAAGTTAGCAGGACAG |
| SEQ ID NO: 839 | ACTAAAAAAGGGTTTAGAGAACTAAAGGAAACATATGATAGGCACATAACAAGCCAGGA |
| | TGCAACTTCTGCTATAAGACATAAAGCACAATTATCTATTA |
| SEQ ID NO: 840 | CTAATGAAGGACAAGAAAAAGGAGACTGTCCTGGAGAGATGAGGACTGAGAAACCCAAC |
| | CCAGCCCCTGGCTCCAAGGAGTCCCGGCCCAGCCCTGGAGA |
| SEQ ID NO: 841 | CAAACCACTCTCTGAGTGACTCTCTTCATCTGATTAAATGAAGATATTAGCAGTTCATAGG |
| | ACTGTTGTGACAAAGCAGGTCACCAACAAATGGGAGCTG |
| SEQ ID NO: 842 | AAAAACGGAAACAAAAAAATAGGAATTTGATGGGGTGGGGTTGGAGATGAGCAGTGTTCT |
| | GAAGGCATTTTTGAGTAATTATTACATATACTGTACACTG |
| SEQ ID NO: 843 | CCACTCCCCTCCCCCGCCCAACCAAAAAATAAATAAATAAAGTAGGTAGAAAAGAGAAAG |
| | AAGCTTCAGTTATAAAGACTGGATAGAAGGTAAAACCATT |
| SEQ ID NO: 844 | CTGAATTATAAAGAAAAAAAAACTAATAAATTCAATAAAGTTGCAGGATAGAAAAATCAA |
| | CATCCACTAATAAACTATCTAAAAAGGAAATTAGTAAAAC |
| SEQ ID NO: 845 | CATGCAGGTAAATAAAACAAATCAAAACTAGCAAACAAAACTAATTAAGAATACTAGGAG |
| | GGAAGGAATGATTGGACTAATGAACTGAGAAATGGAAAAT |
| SEQ ID NO: 846 | TAGTAAGAAAGAAAAAAAAAAAAGTACATGGGGTTCATACTACTTTGTAGTTTTCGTTAA |
| | ATGAAACACTCTCACACAAAAGGTATCTCCAGAATTTACA |
| SEQ ID NO: 847 | GGTCTTCGTGGTTTAAGAACAGGTTTTCTCTGCTTATTTTTATTAAAAAAAAAAAAATTATG |
| | TGAGTCAGTGGTTCTCAAGCAGCAGTGATTGTGCCCCC |
| SEQ ID NO: 848 | TGCTAAAAAAAAAAAAAATAATCAATTGGGTATAATAAATCAGTCATCCATTTCTCATCCC |
| | CACAATCATTCCTGTCTGACAAAAAAGTTTAGGAGAGTT |
| SEQ ID NO: 849 | AAAAAAAATGAAAGAAAGAAAGGAAGATAGGAAGGAAGGAAGGAAAGAGAGAGAGAAA |
| | GAAAGAAGAAAAGAAGAAAAGAAAGAAAGAAAGAGAGAAAGA |
| SEQ ID NO: 850 | ATTATTAAAAGAAAAAAATTAAACAGCATTGCCGTATGATCTAGTAATTTCTATTCAGGGT |
| | ATACACCGCAAAGATTTGAAAACAGATGACTCAAACAGA |
| SEQ ID NO: 851 | TAAAAATTTTTAAAAATAAATAAATACATAAATAAATAAATGTGTGTATATGAATCCATGT |
| | GCATGCACGTATGTGTAAATATTTCTCCAGGTATCCATC |
| SEQ ID NO: 852 | CACCATGAAAAATAAATAAATAAAATAAATTCAAGCTACAAATGAACGTAAATCCTAATA |
| | CGATTGCCTTATGGCCAAGAGATTTACTCCTAGTTCTTCT |
| SEQ ID NO: 853 | GGAGGCCTTGAATTTGATTTACTTTTCCCACTTCAATCCCAAATCTAACCCCATTTACGTCT |
| | CTTGAACTAGTTAGCTCTGGGGGCAGCAGGCAGTGGCC |
| SEQ ID NO: 854 | ATGAAAAACTGAAGGAAAAAAACAATGCAACATGTGATTCTAAAGTGGATCCTCCTATTA |
| | TAAAGAATATTCTCTGGGCATGGTGGCTCACATCTGTAAT |
| SEQ ID NO: 855 | ATGAAAACCTGCTCTACCCTCCCCCCAAAAAATATGTCTTGATTGCTTTTGCTGATGTTATG |
| | TTGGAAACATATCCTATGGCAGATGTGATCTGATGACG |
| SEQ ID NO: 856 | CTAGGAGTTCGAGACCAGCCTAGGCAACATGGCAAGACCCTGTCTCTACAAAAAATATTT |
| | AAAAAATTTAGCTGGGCATGGTGGTGCTTGCCTGTAGTCC |
| SEQ ID NO: 857 | ACATTAAGGCAATCTATTGATGGTAAACTTTTATCAGATGCCAATGTAGTCTCCCAAGATT |
| | TCCTGGAGGGGAAATGGATAACAACACTGAACTTACTGA |
| SEQ ID NO: 858 | TGATGAAGTCAAATGAACAATTCCTTACATTTTGTTTGTGCTTTTGGTAACTTGCTTAAGAG |
| | TTCTTTCCCATACCAGTGTCATAACCTATAGTTTCTTC |
| SEQ ID NO: 859 | TTCACTAGATTTTAGAATAGTAGACTTAAGTCTTTTACCAACTGCCTGACCTTGAGAAAAA |
| | AATATGAACCTCTCTGAATCTTACTTTCCTCCCCTTTGT |
| SEQ ID NO: 860 | AAAAATAAAGTAAAATTATGATGGAGGTCATGGTACCTCCCAGAGTTGTGCAGCTCATGTT |
| | TTGCACAACCATTTAGGGGTTCTAATGGAGCTCTGGGAT |
| SEQ ID NO: 861 | ATCCTGGGTTCTTCTCCAGGCTTCGTGACATTCAGTCATTCATTCATTTCTTCACTAAGCAT |
| | TGCACAGTTCCCCTGAACCAGGCACACCAGGCACTGGC |
| SEQ ID NO: 862 | CAAAAAAGTTTAAAAAAGAAAAAAAATAGGGGACTGATTGAATAAACTATGGCGCAGTA |
| | AGATGCAGAGATAAAAATGCGAATTTTGTCAAGAACCAAGA |
| SEQ ID NO: 863 | CCTCTGCCTCCCGGGTTCAAACGATTCTCCTGCCTCAGCCTCCTGACTAGCTGGGACTACA |
| | GACGCGTGCCACCACACCTGGCTAATTTTTGTATTTTTA |
| SEQ ID NO: 864 | AAGAAAAAAAGAAAAAACCAAAAGCAGTGCATTAGGGGCAATTCCTCCCCCTGCCTCCTC |
| | TCTCCAGTGCTGATGGGCTGAGTGTGGGGAAAGGCGGCTC |
| SEQ ID NO: 865 | AAATAAATAAATAAATATAAATCTTTTGCATCAAAGGACATTATCAAGAATGTGAAAGAC |
| | AACCTACAGAATGGGAGAAAATATTAACAAATCATATATC |
| SEQ ID NO: 866 | CACCCCCCGAAAAAAGAAAGTTGGTAGATTGGTAGTATACAGGATATATCAGTATCCTTTG |
| | GGTGTTTAGGTATAAGGAGATCTGCTTAGAAATTATAAC |
| SEQ ID NO: 867 | ATATCTGAGATAGGCCTCAGTTAATTTAGAAAGTTTATTTTGCCAAAGTTGAGGACACGCG |
| | CCCATGACAGCCTCAGGAGGTGCTGATGACATGCGCCAA |
| SEQ ID NO: 868 | TATCACTGTTGGTCAAATGATAGAAGTCATACTTGGGATGTGTGGCTATTGTTTTGCTTTGT |
| | GACTTACAGTTCTCTAAAGTAGATATGACATTATGGGG |
| SEQ ID NO: 869 | GTTAAATTAAAAAATTTTTAAGTTATTTTAAAAATATAAAAAACAAGATTTGACTGTATTC |
| | TGCCTTGCGCCACTCTTGTTTGTCTTTCACTAGTGCAAA |
| SEQ ID NO: 870 | GGGTGCAAGAGAGAGTTCCACTCCCAGAGAGAGGGGTGAGGGGATGAGATGGTGTGAGT |
| | AGCAGACTTGGGTGCCAGTGAGCAAACAAGGAAGAGGAGGC |
| SEQ ID NO: 871 | CGAATTCCAAAAGCCCCATCTTCATAGTACCCGGGCTCTAAAACAAACCAAATCCCAAAA |
| | ATGAGAAGCAGCCCACGATGAAGATGTCTACAGAGAGAAA |
| SEQ ID NO: 872 | TCCTGATACCCCTCAAAAAGGGGCACATTTTGACACAGAGACAGACACGCATACTGGGAA |
| | AATGCTGTATGAAGCTGAAGGCAGAGATTGGGGTGATGCT |
| SEQ ID NO: 873 | TTTTTTTTTTGCAGAGGGGGTGGACTTTCTGGTTTTAAAAAAAAAAAAAAAAAAAAAAAAA |
| | CCCCTCCACAAAAATTTTTAACAAAAAGTTTAAATGTAA |
| SEQ ID NO: 874 | TCACAAAAAAAAAAAAAAAAAAAAAAAAAGCAAATCCTTAATATGATTTTCTTCTCACAA |
| | AGGAAGCAAATCCTGCTCTGCTCACTTCCATAAATATTAA |
| SEQ ID NO: 875 | AAGGGAGATAAAGTTTAAAAATGAAAAAAATAGGGAATAAAAAGCTCTAGCCCTACCATC |
| | CAATTGGCTGGGGGAATTTAAATAAATAAATAAATAAATA |
| SEQ ID NO: 876 | TGTCAACTTTCTTTTTTTTCTTTTCTTTACTTTTCTATTTTTTTTTTGAGATGGAGACTTGTCC |
| | TGTCGCCCAGGGTGGAATGCAGTGATGCGATCTCGG |
| SEQ ID NO: 877 | TTAAAAATAAAAACAAAAACCTAAGCCATAAGTCCTGGAGAAGAGGTACAGAGATGCTGT |
| | ATCACTCAAGAGGAATGCCTGGGTTTAGAAAATGGGCATC |
| SEQ ID NO: 878 | CCCACCAAAAAAAAAGTCTACCTTTGGTGAAATGACATCATGTCTGGGATTTGCTTTAACA |
| | TATTTCAGCGAAGCAACCTATGAAATGGGAGAAAAATAT |
| SEQ ID NO: 879 | ATCTTTGAAGTATCTCCACAATCATCTGTGGGGTACATAATCTACAGCCGGAGATACTTAA |
| | GGCTTTTTATTTTGTGCCTGGTATAAGATGGCAGATGTG |
| SEQ ID NO: 880 | TTGCACATCTGTGTTCTAGATGTACAATTCTAGATATTTTCAGTTTTACTCAACACAAATTT |
| | CTTCACTCTTGTCATCTGCTAACTTTATTCATAGTGTG |
| SEQ ID NO: 881 | TCTTAGTCTTCATTTGGAATTTATAAAAAATTTTAAAAATCACCACATTTTCCAAAAGTTTA |
| | TGCCAGAAAATCATTCACTATTTAAAAATGAAGTGCAA |
| SEQ ID NO: 882 | ATGAAAACCTGATTTTCCACAATAAAGAAAATAAAACAATAAATAAAATTTTAAACAAAG |
| | ATTTATAGAGCTAAAACAATAAAATGCCTAAAGTAAAGCA |
| SEQ ID NO: 883 | ATGAAAACCCCATTTTCCATGACAATAAAAAAAAGAAAACAATAAATAAAATTTAAAAAT |
| | AATTTATCTAAATGTATAAAATGCCTAAAGTAAAACAAGA |
| SEQ ID NO: 884 | CTGAAGAAAAAATGATAATAATCAAGGTAAAATCGCAGTGCTTGATTTATGGCATGACCTT |
| | TGACAGAAGCAGTAAAACTTTTGTATGGAAGAAAATCAG |
| SEQ ID NO: 885 | AAGAAAACCAACCAAACAAACAAAAAAAAGCTGTATTGTATACTTAATAATTTGCTAAAA |
| | GAGTAGATCTTATGTTAAGTGTTCTTATAATAAACAAACA |
| SEQ ID NO: 886 | TTATGCCACTACTGCCTTCTAGCCTTTGTGGTTTCTGATGAGAAATCAGCTGTTAATCTTAC |
| | TGAGGATCTCTTTTATGTGAGACGTTGCTGCTCTCTTG |
| SEQ ID NO: 887 | ATGAAAAACTGCTTTTCCACAGGGGGAAAATACTGTTTACTGCCCATCTTTGAAAAACATT |
| | TTACTTAGAGCATAAACTTGAAGCTAGATCCTTTTAACC |
| SEQ ID NO: 888 | CTTATGATGTTTGTTGCCAATGATAGATTGTTTTCACTGTGCAAAAATTATGGGTAGTTTTG |
| | GTGGTCTTGATGCAGTTGTAAGCTTGGGGTATGAAGGT |
| SEQ ID NO: 889 | GCCCCCAAATATAAAAAAATAATAAGGCATTCACCCCTGAACTTTAGCAGGGCTTCCAATC |
| | GCCTTTAAGCACTCATTTAAAAGAAAAGTCTTTTATTCC |
| SEQ ID NO: 890 | GTATATTGTTAAATAATTTTTTATAATTAAAATGAAAGAAACTATCAACAGAGTGAACAGA |
| | CAACCTACAGAATGGGAGAAAATATTTGCAAACTATGCT |
| SEQ ID NO: 891 | CAAAGGGAAAAAAATAAGTTGTATTATTATTATTATTATTTTGAGACAGAGTTTCGCGCTT |
| | GTTGCCTAGGCTGGAGTGCAATACCACGATCTCAGCTCA |
| SEQ ID NO: 892 | TTAGAAAAAATATGTATAGACAGCACATCAATCATGATTCCAAGTTGATAGTTGCTTAGAA |
| | AGATTTTTATACATTAGGTACTCTTAGTACAAATATATC |
| SEQ ID NO: 893 | ATTTTATTTTATTATTATTATTTTTTGAGATGGAATCTCACTTTGTCACCCAGGCTGGAGTGC |
| | AGTGTTGCGATCTTGGCTCACTTGCAACCCCCACTGC |
| SEQ ID NO: 894 | CCACCCGCCAAAAAAAACTATATTAGGAAAATTTATAATGGAAGCAAAAATGGATTAGAT |
| | AGGGTATTTTTGTTGATTTCTACAGAAGAATAAACTGATT |
| SEQ ID NO: 895 | TCCCCTCAAAAATAAATTTTTTTTTTTTTTTGAGACAGAGTTGTCGCTCTTGTTGCCCAGGC |
| | TGGAGTGCAGTGGCGCGATCTTGGCTCACTGCAACCTC |
| SEQ ID NO: 896 | GTGATAGGAAAATTTTCGCCAGCATAGTAAGAGCAATTTGGGTTTCCCAAAGTGCAAGGT |
| | GAATATTTCAATGGGTAAAACAAATAATTTTCAATGAAAA |
| SEQ ID NO: 897 | CAGGAAGAAAAGAAGAAATACACTATACACTACCCATGAATTATCCCAAAAATGAAATTA |
| | ACATTTATAATTGCATAAAAATTATTAGGAATAAATTTAA |
| SEQ ID NO: 898 | GAAAGTGAAAATAGAAAATAATATGAATAGTCCTCTATTGGAAGGATGATTAATAAATGA |
| | TACCCCTGTACTCATAGCTCCATCATATTTGACTGTAAGG |
| SEQ ID NO: 899 | CTGAATATTTCAGTATTAAAAAAAACAGAGGAAATGAAAGTGCCCTCTATTGGCAGGTTTA |
| | ACTGCTTTATACTCTCTTCCACTATTCTGTTGGATGAGG |
| SEQ ID NO: 900 | AATAAAAAAAAAACACTTTAAAAAATATTTTTAAAGTTCACTTAAGTTGCTCATTTTATAA |
| | AATGGAGTTTTTCATATTTATGTTGGATTTCATTACTTT |
| SEQ ID NO: 901 | ACACGCTACAAATACCTGAGACTGCGTAATTTATAAGAAAAGAGGTTTAATTAGCTCACG |
| | GTTCTGCAGGCTGTACAAGAAGCACAGCAGCTTCTGTTCA |
| SEQ ID NO: 902 | CCTTACTGGAAGTTGAAAGGTAGCTGTTATTATGATCGGCGCTGGGTCTGGATGTGTGGTG |
| | TTCAAAACACGGGCTGCTGGGCAGTTCGCTTTCGTTTTC |
| SEQ ID NO: 903 | ACACACCAAAAAACAAACAAAAAAAAACAAAAAAACCCACCTTAAACCTACTTTTACACT |
| | ATTCTGTAACTGAAGAATTATCATTTCAGTTGAGCAATCT |
| SEQ ID NO: 904 | CTGGCCACCCTGCAAAAAAGAGAATGGAATATTCTAGTTAATTAAATTTCCTGAAGAATGT |
| | AAACTTTTAATACACTTTAGTCCTTGGTGAAAATCATTT |
| SEQ ID NO: 905 | CCATCTTATTTACTTCCTTTTGATATTTCAAAATTCATGCAGACCAGGCATGGTGGCTCATG |
| | CCTGTAATACCTGCAGTTTGGGAGGCTGAGGCAGGAGG |
| SEQ ID NO: 906 | CCAAAAAATTGTTGAAAAAAAAGAAGTTGTGTGCTTATCCCCAAAATAAATAACTCACTCT |
| | TCTCAGCCTTTTATTATTCTGAGTGAGACTTCATTTGAA |
| SEQ ID NO: 907 | AACCCTCATGAGACCTCAACCATGCTCAGATCTCCAAACTGAGAAAATACATCAGCTACCC |
| | AGTCTATAATATTTTGTTACGGCAGCCCATGCTAAGATA |
| SEQ ID NO: 908 | CTGAATTGTTTTAGAAAAAAGTGGGAAGCAAGGGGAAAGAGATTCAGTAGGTGAACACAT |
| | TTAGATCATGCAGGTGAAAGGACCACACTACTGTGGGTCA |
| SEQ ID NO: 909 | AATAAAAATACAATACAATACCATACAATACAATATATAATACAATACATTCCTCTCCATA |
| | AATTCCTCTTCTGGAAAGCCCCCCTCAAAAAAAAATTCC |
| SEQ ID NO: 910 | CCAAGAAAAAAAAAACACATTAACATGTTCTTTTATCTCACAGAATTGAGCATTTATTCCC |
| | TGTCAGGTAAGAAATATATTAGGTGAAAGTGGCCTTTCA |
| SEQ ID NO: 911 | GTTAAAGAAAAAAAAAATCAAACATTTAGAAAATCTTGTTTCCTCTGTCTCCCCTAACTTT |
| | TGGGGGAGATGGAGTTTTTGTTTTTGTTTTTGTATTTTT |
| SEQ ID NO: 912 | TAAATAAAGAAAGAAAAAGAAAAAAAAACGTCTTCCTCAATCAAATCCGAGGTGGTTCCT |
| | TCCCCCACCAGGCTGGCTGGGTGGGGAGAGAAGGCTTGAA |
| SEQ ID NO: 913 | CTGAAAACAAAAATTTTTTTTATAGAGATGGGGTCTCACTTTGTTGCCCAGGCTGGCCTCA |
| | AACTCCTGAGCTCAAGCAGTCCACCTACCTCGGCTTCCC |
| SEQ ID NO: 914 | GGGGAAAAAAAAAAGGAAAAAAAAACTCATTTGGAGTTTAAAATATAATTAATTAAAAAT |
| | TAATCCTGTGGGGTCACGTATCTAAGGGAGACTTTAACCC |
| SEQ ID NO: 915 | TGGTACATGAGATTGGGCAGGAAGAAATGTGGAGAATAGAGTCACCAGAACCACCCATGT |
| | GGAAGAGCACTAGTGTACGAGAAATTATGGAAGAGCCTTG |
| SEQ ID NO: 916 | ATATGTGGTAATCCAACAATAGAAATTATTTTTAAGTTTGTGTGTTCCTTTTTCTGTTCAAT |
| | GGTGCTTTTGATATTGTTGTAAAGCAGTGACTAGCAGA |
| SEQ ID NO: 917 | ATATAAAGCTGTTAAAAAATCAGATTGACTTCATTTAGGGTGTTTCTTACAGATATCGTTTA |
| | AGTTTTCGGTTCTGCTTGTAAACGCTTCAATCGCTCAT |
| SEQ ID NO: 918 | ATTCTCCTGCCTCAGCCTCCCGAGTAGCTAGGATTACAGGCATGCACCACCACGCCTGGCT |
| | AATTTTTTTTGTATTTTTAGTAGAGACAGGTTTCTCCAT |
| SEQ ID NO: 919 | CACGTGAAAAAAAAAATTATAATTCTACCCAGAGATAATGCACTATTAATATGTGGGCAA |
| | TCATCCCTGTGGTTTTCCTTCTCCTTATACTTGCCCCCAC |
| SEQ ID NO: 920 | ATGCAAGTTTACAAAAACCAAAACTATGTACACAAATTACATGCTAAAAAACCCAAATAC |
| | TAAAAATTATGAACATGACTGAGTGAAACTATGAGTCTTT |
| SEQ ID NO: 921 | CACTTTGGGAGGCAAATCCCAAGGTGGGCAGATCACCTGAGGTTGGGAGTTCGAGACCAG |
| | CCTGGCTAACATGATGAAACCCCGTCTCTACTAAAAATAC |
| SEQ ID NO: 922 | CGAGGTATTAAAAAAATAAAATAAAATAAACAACCAGATCTCAGGTGAACTCAGAGCGAG |
| | AACTCACTCATCACCAAGGGGATGACGCAAAGCCATTCAT |
| SEQ ID NO: 923 | AAAGAAGTTTAACTGACTCACAGTTCCACATGGCTGGGGAAGCCTGAGGAAGCTTACAAT |
| | CATGGGGGAAGGCGGAAGAGAAGCAAGGCACGTCCTACAT |
| SEQ ID NO: 924 | AAAACAATAAAATAAAATAAAATAAAAGTTGCTTAAATAGAATCAGGTGCCTGTCTCCAG |
| | GCTTCTCTGACAGGCGGGAACAGGGAGGCGGGGGGCCCAA |
| SEQ ID NO: 925 | TCCTAATTGATAAAATAAAAATATTTTTGAAAGGGAAGAATTAAAAATCATGGGATTAAAT |
| | GACAGGAGGAGCCAATCTGGGTATTCATAAAATGACTGA |
| SEQ ID NO: 926 | CCCACCCCCACCAAAAAAAAAAAAAAATCAGGCTGGGCACAGTGGCTCATGCCTGTAATC |
| | TCAGCACTTTGGGAGGCCAAGGCAGGCAGATCACGAGGTC |
| SEQ ID NO: 927 | CTGAATAAGAAAAAAGAAAAGAAAAGAAATTAGCTGGGTGCGATGGCTTATGCCTGTAAT |
| | CCCGGCACTTTGGGAGGCTGAGGCAAGCGGATCACTTAAT |
| SEQ ID NO: 928 | GGTAGGCAGCAAATATAGTGTCTGTGAGATTTGAGGCTGCCTTTCTTCTCTGGGATAGACC |
| | ATCTTTTGATTCTTTTCATTGCGATTAGTTGGAAATTTC |
| SEQ ID NO: 929 | CTGAAAAGAAAAAAAAAAAAGAGGAGAACAGCAGACACCAGGGCCTACTTGAGGATGGA |
| | GGGTAGGAGAAGGGAGAGGATTAAAAAAACTACCTCTTCGG |
| SEQ ID NO: 930 | CTGAAATAAAAAAAAAGAAAAACAAAGCTCAAGTTTGCCTCATTTGGCAAATGATTCCCA |
| | GGTGAAAGCTAGCGTTCCATGTTCTGCCTACTACTCTCTA |
| SEQ ID NO: 931 | CACTCCTAAAAAAAAAATGGAGAAACAATTATTATATTTTCAGATGAAAAGACTGGGGGA |
| | ATTTATTACTGGTACACTTGCTTTACAAGAAATGGTAAAG |
| SEQ ID NO: 932 | CCCCTCCAAAAAACGAAATTAAAAAAAAAGTTAAACAAAACAAAACCCAGGCTGGGCGC |
| | AGTGGCTCACGCCTGTAGTCCTAGCACTTTGGGAGGCCGAG |
| SEQ ID NO: 933 | AGCAGGTGGATCCTTTGAGGCCAGGAGTTCAAGACCAGCCTGGGCAACATGGCGAAACCC |
| | ATCTCTACAAAAAATACAAAACTTAGCCAGCACGGTGGCA |
| SEQ ID NO: 934 | CAAAAGGCAAAAAAAAAAAAAAAAAAAAGACCCAAACAGAAGCCTAAGAATCAGGTACA |
| | TCTTTCCAGTTGGTCTCTTCCTCTTGGAAAAGTCCATATCA |
| SEQ ID NO: 935 | AAAAAAAAGAAAATTATTGAGATTATTGGCCAGATGCAGTGGCTCACACCTGTAATCTCA |
| | GCACTTTGGGAGGCCGAGGTGGGCGGATCATGAGGTCAAG |
| SEQ ID NO: 936 | TGGGTTTTTTTTTTTTTTTTCTAATATTAAAAAAAAGAAGAGGCTGGGCGTGGTGGCTCACG |
| | CCTGTAAGCCCAGCACCTTGGGAGGCCAAGGAGGGTGG |
| SEQ ID NO: 937 | CCACCACCACCACCAAATTAAGAAAAGCCGTAAGAATGTGTGATTAGTCCTTTCTGAGTCT |
| | TTAATGCTTTTTACAATAAGGATGTATCGTGTTTTTAAC |
| SEQ ID NO: 938 | CAAAGGAAAAAACAATAAAAAGGCAGTAGGAGCAGGTCATTCCCATTCATTCAAAAAACA |
| | GTTGTCTGGCTAGCACCGTGGCTCTCACCTGTAGTCCCAG |
| SEQ ID NO: 939 | CCGAATTTAAAAAAAGAAAAAAGAGAATTCATTTTTAACCATAATGTGCAAATACTGTATT |
| | TGATGTATCCTGTACTCTGTCACTTGTCTTCGAGTGCCA |
| SEQ ID NO: 940 | AGCTGCCCCATGGGCTAAGCCAGGGAAGGCTTTCTGAACAAGTGAGTGTTGCAAACCTGC |
| | AAAGGTTGGAGAGGAAGGTGGAGGGACACTCCAGAAAAAG |
| SEQ ID NO: 941 | GTTTTTGTTGTTGTTGTTGTTGTTTGTTTTTTGTTTTTTTTGAGACGGAGTCTCACTCTATCAC |
| | CCAGGCTGGAGTTCAGTGGTGCAACCTCGGCTCACT |
| SEQ ID NO: 942 | TAATTTTAAAAAAAGAAGACAAGCACAATTCAGATAAGTAAAATAGAATTAATTAAATGC |
| | ACGAAAGAGAGGAATAACCAAATACTTTGAGAGCTGAGCT |
| SEQ ID NO: 943 | TGCAAATAAAATAAATATATTAATAAAATTTAAAAATGAAAAGCTTTTGCCTTTTTATTAC |
| | CTCCCAAAATACACACACACACACACACACAAACACACA |
| SEQ ID NO: 944 | TGACCTTGTTAAGAGGCAATTTGATGTCTTCCTGGGTGATTTAAGAGCAACTTGATTGTGA |
| | CAATCATGAAAATGGTGTGCAAATGAATGAACTTTTGGT |
| SEQ ID NO: 945 | TGAATTAAAAAAAAAAAAAAAAAAAAGAAGAAGTTACAGGTTCTGCCCACACTCAAGAG |
| | GAAGAGATTATATCAGGGCGTGAATACCAGGAGGCAGGGAT |
| SEQ ID NO: 946 | CTACCACCCCCAAAAAGCCCAAGTCTCAAGAGGTAGTCTGGAAAAAAGTGTTTTTGGATTT |
| | ACCTACATTTTTTTTTCCAAGATGGAGTCTCGCTCTGTC |
| SEQ ID NO: 947 | CTGTGCCAGCTCGTGGCCTGTTCTTTGCACTTGTGGGGAAGGGGTCCCCTTTTCCCACAGCC |
| | GTCCCCCCGGGGCCTGCTCCCAGGTGGGGTCTGGTTTT |
| SEQ ID NO: 948 | CTCACGCTTAAAATAATAATAATAATAAAATAAAATATATTTTAAGTCTCACGCCTGCAAT |
| | CCCAGCACTTTGGGAGGCTGAGGCGGGCAGATCACTTGA |
| SEQ ID NO: 949 | CGCCCAAAAAAATAAAAATACAAAAATCAGTCGGGCGTGGTGGCTCACGCCTGTCATCCC |
| | AGCACTTTGGGAAGCCGAGGTGGGTGGATCACCTGAGGTC |
| SEQ ID NO: 950 | TGAATTCAACTGAGTATCCAGTTTCATAGAAATAATAATAACATCTTCTATAAAATGTATT |
| | CTTGTGTATTAACACATGGGGCTCTCTAGTACTCCTGCT |
| SEQ ID NO: 951 | GTCTAAAATATTAAACGACAACAACAACAAAAAAATCAATGGGGAGAGCTAGGACATGG |
| | AGGCAGGACATTAGAGCCATTTGATTTAAAAAATCATGGTG |
| SEQ ID NO: 952 | GCTTTTTATTTTATTTTGTTCATTTTTTTAATTTAAAAAATAGTGAGAAAAGAAGAAAATAA |
| | GCCCAATGCCAGCAGAATGAAGGAAATAATAAAGATAA |
| SEQ ID NO: 953 | ATGAACCATCTTTGTTTAAAAAAACGAAAACAAACAAAAAAACAAAAAAAAACTTAGCTC |
| | CATGTAAAGGACTTTACATCTAACTTTGTGTTGAATGTAC |
| SEQ ID NO: 954 | AGAAAGAAAAAGAAAAGAAAAAAAAATATTTTAATGGAGAGAGTCACCATGAGATACAA |
| | ATGCACAGATGGGAGGGAGAGGCAGCAGTTCTGGAGGAGAA |
| SEQ ID NO: 955 | ACCTTATTCACGCCTAAAAAGTAGACTGACTGTGGGGTGGTCGTGTTTTTTGTTTCTTGTTG |
| | GTAGGTGGTGAATGCGTTTTTTTCGTTGTTTTCTCCGT |
| SEQ ID NO: 956 | GAAAGTAAAAATAGCCGGGTGCGGTGGCTCACGCCTGTAATCCCAGCACTTTGGGAGGCT |
| | GAGGCAGGCAGATCATGAGGTCAGGAGATAGAGACCATCC |
| SEQ ID NO: 957 | ACAGCAACAATAAAAATAAAGCAATAAACGTAACAACATGAATGAATCACAACGCATTAT |
| | GCTAAGGATAGGAAGCCAGACTCAAAGGGCCATAGAATTT |
| SEQ ID NO: 958 | CCACCAAAAAATATATATATATATTTTTAAAGAAAAATGGTGAGGTAACTGAACTGTTAGC |
| | ATGTGCCAAAGTTAGGGTCTTGAGAACCTAAAGTTTTAA |
| SEQ ID NO: 959 | ACACCTTTACACCTAAAAAGTAGACTGGGGGCCTGGCGCGGTGGCTCACGCCTGTAATCCC |
| | ATCACTTTGGGAGGCTGAGGAGGGCGGATCACGAGGTCA |
| SEQ ID NO: 960 | TGAATATTAAAGAAAAAATACAGAGAAATCTCATACTTTTAATACAATCAGGGTTTCACAT |
| | TGATGAAATCCCCCCTTTACTTTTTTTGAAGTATTGTTT |
| SEQ ID NO: 961 | GTGAATTTTAAAAAGAGGAGAGAGAGAAGCCGCAGAGGATAGTGCACAGAACTGAGTCC |
| | AGATCCCAGTTCTGTCTTTGTTTTTTTGTTTGTTTGTTTGA |
| SEQ ID NO: 962 | GGGGGTTAAAACACAGTGTTACAGGCCAGGCGTGTTGGCTCACCCCTGTAATCCCAGCACT |
| | TTGGGAGGCCGAGGCAGGTGGATCACCTGAGGTCAGGAG |
| SEQ ID NO: 963 | TTCAAAAAACAAAACAAAACAAAACAAATGGCCTTTTATTTCCTAGTGACTGAACTCTTTT |
| | AACATTTGATTAACGTCCATTTCAAAAATGGCTATATTC |
| SEQ ID NO: 964 | AGAAAAAAAAAAAAGAAAGAAATTATAGGCCGGGCACGGTGGCTCACGCCTGTAATCCTA |
| | GCACTTTCGGAGGCCGAGGCAGGCGGATCACGAGGTCAAG |
| SEQ ID NO: 965 | AAAAAGGTAGAGGAGAGAGAGGTGCGTGGAAGAGTGAGCACAAGAAAGGAGGCATCTTA |
| | CAGTTTATAAACATCTGAACACTGGAGCTCTATCAAGATTC |
| SEQ ID NO: 966 | GGGGGTTAAAACACAGTGTTACGGGCTGGGCGTGTTGGCTCACGCCTGTAATCCCAGCACT |
| | TTGGTAGGCCGAGGCAGGTGGATCACCTGAGGTCAGGAG |
| SEQ ID NO: 967 | CATGGGAAAAAAAAGAGAGAGAAAATAAAATTGAGTCATTTAGTGGATATAGAAAATTG |
| | AAAGGAAACCACATACTGGAAACAATTCAATATGCCTACAA |
| SEQ ID NO: 968 | GGAAAAAGAAAAGGAAAGGAAAGGAAAGGAAAGGAAAGGAAAGGAAAGGAAAGGAAA |
| | GGAAAGGAAAGAAAGAAAATTGACTCGTTTAGTGGATATAGAA |
| SEQ ID NO: 969 | CGTGGAAAAGAAACAGAAAAGAAAAGAAAAGAAAATTGACTTGTTTAGTGGATATAGAA |
| | ACTTGAAACTAGACCATGTACTGGAAACAATTCAGTATGCC |
| SEQ ID NO: 970 | GAAAAAAAATAAAAAAAAAGAAAATTGACTCGTTTAGTGTATATAGAAAGGTGAAAGAA |
| | GGCCATATACTGGAAACAATTCAGTATGTCTACAGAAATTG |
| SEQ ID NO: 971 | TTCTAAATAAATCTATATTTTTTAAAAAAAGAATTGATTGGCCGGCCATGGTGGCTCACAC |
| | CTGTAATCCAGCACTTTGGGAGGCCGAGGCAGGCGGGTC |
| SEQ ID NO: 972 | TTATTTGAGCGTTTTAAAAGTAGATGCCCTTAGCCATTACGACGGTTCGTATTTACTCTGAA |
| | ACAAGAAACACACTCAAAACTCAGAGAAAACATTGTTC |
| SEQ ID NO: 973 | CACTTTGGGAGGCCGAGGCGGGTTGATCACGAGGTCAGGAGTTCAAGACCACCCTGGCCA |
| | AGATGGTGAAACCCCATCTCCACTAAAAATACAAAAAATT |
| SEQ ID NO: 974 | ACTTTCTGGAGTTTCAAAAACAGACTGTACGCCAAGGGTCATATCTTTTTTTGTATTGGTTT |
| | GTGTCTTGGTTGGTGTCTTAGGTGTTAATCCTACAGTG |
| SEQ ID NO: 975 | ACCTGACATAACGGGGTTCAAGACTGACAACGCCTCACGCCCATCCAAAAACGTTTACAT |
| | GGCTTCCTTGTCTCTTTTTTTTTTTCTGTCCTAAAGTCGC |
| SEQ ID NO: 976 | TAGACAAGTTCTAAAAGAGCTGTAACACTGAAGATGGTTCTCTTCTCTGGAAAAACTTCCC |
| | ACGGGAAAAACAAAAATCTTCCTTTAAAAATTTTTTTAA |
| SEQ ID NO: 977 | CTGAATATTTAAAAGAAGAGAAGCAAATCCAGTCTCACATAGATAGCTGGAAAAGTGATC |
| | ATACTTGCGGAAAGGCTGGCATAAGGGCCTTTTGAGAAGT |
| SEQ ID NO: 978 | CACAAAAAGAAAAAGAAAAATCTGTCTGTACTGTCTATTGAACATAAGGCTGCAAAAAAG |
| | ATAAATTTAGACACAGTCATTGACAAATTTGCAGAAGTTA |
| SEQ ID NO: 979 | GAATGTTCTGTTACTAAAGAGAGACGTGTGGGTGGGGTGTTTCATGCTTTGGGAGGTTGGG |
| | GTAGCTCCACAAATGTCACCCAGGTTGTAGCGGAGTGGT |
| SEQ ID NO: 980 | CATCAACGGTGTTTAAAAATCAGATAGAAAGTTGTGTGTTTGTTGCGAGGTGTGAGACAAC |
| | ATTTTGTTTGAACATTTATTTTGGGCTGTTGTAATGGTG |
| SEQ ID NO: 981 | ACATTTTTAAGTATTAAAAGTTAGGCAACTACAACCAAGGAACTTGGTCATTTGTTATTTG |
| | TACCAAATGTTCACAAACTTATTCGGGCGTGGTGGTGCC |
| SEQ ID NO: 982 | CCCCACACAAAAACCAATTTAAAAACTACTTATTTAGCAGGTTTTTCCTTAGCACCTCTTCC |
| | TGTACATGACACCGTATGGGGGCTGTGGGCCTGCCCTG |
| SEQ ID NO: 983 | CAGGAAGAAACAAGACTTAAAGAAAAATGTGGCCAGGCGTGGTGGCTCACATCTGTAATC |
| | CCAGCACTTTGGGGGGCCAAGGCAGACGGATCACTTGAGG |
| SEQ ID NO: 984 | ATGAAGGGGGGGAAAAAAAGAGGAAAATCTGTTTAGTGTAGCCACCTTCATCAATGACCT |
| | TAGCTAGATCTTCAAGACAACTTGTTGCAGTTTTTACAAT |
| SEQ ID NO: 985 | TAATGCAGAAAAGAAGTTGATTTTAACACAATTGTTCATATTAAATGAGGCTAGATTTGGA |
| | TTTATATAGTTTCAGCTGCATAGCTCCTTGACTAAATGG |
| SEQ ID NO: 986 | ATGAAAAACCTCTTTTCCATGAAATTGAAAAAAAATGTTTTTGAAAAGGAAGAAAAAAAA |
| | GAAATACCTGAGGCTGGGTAATTTATAAAGAAAGGAGGTT |
| SEQ ID NO: 987 | CACATTATGTAATAAATTTTAAAAATGAAAAAATAATAAAAAGGAGAGGTGTTGGTACCA |
| | GAAGGAGGGAAGGAAAGAATGAGAATGCCAAGCAGATAAA |
| SEQ ID NO: 988 | CTCAGACATCCTTATTATCAGTCTAGTGATTTTTGCTGCTGTTCTATTCCTTTTATTTTCCTG |
| | TTAGCTCCACAATAACCTTTTAGTAGTCATTTCTCTT |
| SEQ ID NO: 989 | ATATGGAGACTGAACAAAGAAACAGAAAAAGAAATGTGGCCTCTTCCTTGGCTAAAAATT |
| | TTAACATAACGTGGTCTTGAGAAAAACATGGTCTATTTCT |
| SEQ ID NO: 990 | CCAATATTAAATTTAAAAAAATTGTTGTAAAGATTAAATGAGACAATATATGGTCAAATCT |
| | TTAGCAGAATACTTAAAATATAACAGGAGAGGCTCAATA |
| SEQ ID NO: 991 | ACAGAAAATACTTCTGTAAGGATGTCTGTCTAGCAACTGCCTGTTCAAGCTTGGACTTGTG |
| | CCACCCTTGTAGCCAAGGATAATTGATTTGAACAATTGT |
| SEQ ID NO: 992 | GTGCTTTTGTGGTGCGAATAGTAGGTGAGCCGTAAGTGTTTTTGTAATTCAGGGTGCGGGC |
| | TCGTGTTTTGTGGCTGTGTTCTGTCCGGTCAGTTGTTTC |
| SEQ ID NO: 993 | CCTAACATAAACGGGGTTCAAAACTGACATCGCCTAACGCCTACCCGAAAACGTTTACGTG |
| | GCTTCCTTGTCTCTTTGTTTTTTCTGTCCTAAAGTCGCC |
| SEQ ID NO: 994 | ACATACCTTGGCTCACCGCCGACGCGGTGACCCTTCGCCAGAGACCCTTCGCCGCCCTCCT |
| | AGGGATCTTGAGGGCCTTCCTTGTTGTTCTCACCGAAGC |
| SEQ ID NO: 995 | AATTTTCCAGTGCAAAAAGCAGTTGGTATGCAAAGGTCTACTTCTCGCTTTTTTTTGCTGTA |
| | TAATCTTGGTGGTGGTGTGTTATTCTTATAGCCGGATG |
| SEQ ID NO: 996 | TTCACAGTACTTGACTTACTCCAAGACCAGCAATAGATAGAGCCCTAGCAGATCCTTGATA |
| | ACACTGTCTGAAAAGACAGAGCCCCAGGGAATGAGTTCC |
| SEQ ID NO: 997 | ATTTTTTGTAGTTTAAAGAATAGTCTACACAGCAAGGGTTACTTGTTTTTTTTACTGGCTTG |
| | TGTTTTAGTCTTAATCGTTACTCTCACAGTCGAAGGCT |
| SEQ ID NO: 998 | CCTAACATAAACGGGGTTCAAAACTGACATCGCCTCACGCCTACCCGAAAACGTTTACGTG |
| | GCTTCCTTGTCTCTTTGTTTTTTCTGTCCTAAAGTCGCC |
| SEQ ID NO: 999 | GGAGGTTGTAGTGCAAAAAGCAGTTTGTCTACCAAGTGATACTTTCAGCTTTTACAAATGC |
| | TGAACAATATCCATGGTGTGTTTTCATGTCACCTCCTCT |
| SEQ ID NO: 1000 | ATTTCTTTTTTTCTGGTTTCAAAAATAGACCGTACGCTCCTTGTTACTGCTTTCTTTCATTGG |
| | TTTGTGTTTTTTGTGGTGCCCTTAAGTGTTACTGTTA |
| SEQ ID NO: 1001 | CCTGACATGCCTTGGCTCACCGCCGACGCGGATATCGCCGCCAGGGACCCTTCCCGCCCTC |
| | CTACGAATCTTGAGTGCGCTTCCTTGGTGTTCTCACCGA |
| SEQ ID NO: 1002 | AATTTTTGTAATGAAAAAATAGACGGCAAGGGTTATTCTTAAAACTGCAGTTTTGTAGCTT |
| | GGGTGGCATGTTAAGTGTTCTCCTTACAGTCGCAACGAT |
| SEQ ID NO: 1003 | TATTTTTGTCGTTTTAAAAATAGGTTTTGTTTGCTGCAGAAACGCATACTGGGCGTCAGCGT |
| | AAGCTGAGAATCAGGTCTTTGTTCCCATCTGTAACTTC |
| SEQ ID NO: 1004 | TCATTAGGAAAATGCTAATTAAAACTACAATGAGATATCCTTACACATCTATCAGAAAAGC |
| | TAAAATAAAAAATTGTTGCCGGTTGCAGTGGCTCATTCC |
| SEQ ID NO: 1005 | TTTTTTTTTTTTTTTTGCGGTGTGGAAAGATAGACTGCATGCAGTCTATCGTGTTATATCCTG |
| | GACGGCATCCGAAGTGTTTTTCCTTGTAGTTAGGAGG |
| SEQ ID NO: 1006 | CCTGACATGCCTTGGCTCACCGCCGATGTGGATATCGCCGCCAGGGACCCTTCCCGCCCTC |
| | CTACGAATCTTGAGTGCGCTTCCTTGGTGTTCTCACCGA |
| SEQ ID NO: 1007 | AATTTTTGTAATGAAAAAATAGACTCCCCTATAAGGGTTATTCTTAAAACTGCAGTTTTGT |
| | GGCTTGGGTGGCATGTTAAGTGTTCTCCTTACAGTCGCA |
| SEQ ID NO: 1008 | AAATCTTGCAGTGCAAAAAGTGAATTCTGCAGGAAGGGCTACTCTTAGTTTCTACTTAGCT |
| | TTCTACGGGTTTGTAGCTTTGCTGGCATGTTAAGTGTTG |
| SEQ ID NO: 1009 | AATTTTGTGCTGGAAAACGCAGATTGTATGTGAAGGGATACTTTTAGTAGTGCATAATATG |
| | GGTGGTGTCATGTTATTTTTACAGTTGGATGGCTGGGGA |
| SEQ ID NO: 1010 | TTCACAGTACTTGACTGACTCCAAGGCCAGCAATAGATAGAGCCCTAGCAGATCCTTGATA |
| | ACACTGTCTGAAAAGCCAGAGCCCTGAGGAATTAGTTCC |
| SEQ ID NO: 1011 | ATTTTTTGTAGTTTCAAGAATACGCTGTACTCTAAGGGCTACTTTTTTCTTTCATTGATTTGT |
| | GTCTTGGACGTGTTATTCTTACAGTGGAAGGCTGGGA |
| SEQ ID NO: 1012 | TCTTCTTATTCTCAGTTGAGCTTTTTCTAATTAAATGTATTACGAAATATTTTCAAGAGTCC |
| | CTTAAGAAAATTTCCACATATTTCAACATGTATCTTGC |
| SEQ ID NO: 1013 | GAGGCCGAGACAGGCCAATCATGAGGTCAGGAGATCGAGACCATCCTGGCTAACACGGTG |
| | AAACCCCCGTCTCTACCAAAAATACAAAAATTAGCTGAGT |
| SEQ ID NO: 1014 | CTGAATTTGAAAAAAAACAAAAAAAAACAAAAAAACAGCTGGGCTAGTCATAGTGGCTCA |
| | CACCTATAATCTCAGCACTTTTGGGAGGCCAAGGTGGGTG |
| SEQ ID NO: 1015 | AGATTAAAACAGGGACATAGAATTTGAAGCTTCTAGAATCTATAACTACAACAAATATTA |
| | AGTACACCCCAACTGCTAGCCAGATTAACAGAAACGCTCA |
| SEQ ID NO: 1016 | AAAATGAAAAATAAATAAAATGAAATATCAGAAACACATTTTAACTAGGCATCCAGTGCT |
| | CCACCTTTAAAACAAGGAAGTGCGCTTTCGGCTGCATTAA |
| SEQ ID NO: 1017 | ATCATGTTTTATAAAAAAAGACTTAAAGAGGAAAACATTATGGTGCAACTTTAGGCTTAAG |
| | TGATTCATTGTCACTGTTTGTTTAAACATTGTGTAACAG |
| SEQ ID NO: 1018 | TTTTTTTTTTTTTTTTTTTTTTTTTAAAGGGAGTCTCATTCTGTTGCCCAGGCTGGAGTGCAG |
| | TGGCATCATCTCAGCTCACTGCAACCTCCACCTCCCG |
| SEQ ID NO: 1019 | TTTAAAAAAAAAAAAAAAAGTTGGAGCGTAATTCTCTCCATCCTCCCAAAGTGGGCTGGA |
| | CTTAATAACTTGCTTCAAATGAATACATTGTTTTGGAAGT |
| SEQ ID NO: 1020 | TAAATAAGTTGGTGTTCAGCCTTTTACTATCAGTTCTTTGAGCTTATTAGTCTGCCTCTAAG |
| | AGACAGGCGCAAAATTAAATTTCCAAGCTTGTAGGCTG |
| SEQ ID NO: 1021 | GTCACTCTTGTCCAATGAGAGATCATAACTTGAAGTCGGTGGTCTTTATTGTATAATTTATT |
| | TATTATAAAAATGCATACAACATAAAAGCATCTTCAGC |
| SEQ ID NO: 1022 | CTGAACAACCAAAAAAACATAAAAATTTAACTCCTCCTCAGCTTCACTTTGGCACAATGCC |
| | AGAAGGACCTCTATTAAGTTGTGCACATTTGTGCAGCCC |
| SEQ ID NO: 1023 | CACCCCCAAAAATGTGTGAAATGGAAAACTGCATGTATATTTTACCACAGTGAAGAAACA |
| | AAAAAAAGAAGTTATTCCTCTGGGCTCCACTGTACCAGGG |
| SEQ ID NO: 1024 | CAACAGAAAGATCAACAGAAAGATTGATTCAAACTTTCTTGGGCATCAGAAAGTAATGAT |
| | TCAGAGTTTGGGCTCTAGAATTAGACTGCCCAGGTGCCAA |
| SEQ ID NO: 1025 | CATCAATAAATAAATAAATAAAATAAGAAAAATGAATAAAAATAAAAGTGGAGAGTTCA |
| | AACCAACCCAGTACAATCACTCTGGAACCCATCTAGAGCTT |
| SEQ ID NO: 1026 | CACAAAAAAAGAAAAATTAAAATAAATTTTAAGAGTCCTTTATCAAGAGGGCCTGCCTGC |
| | TGCCCTCCTGGCTTGTGAGCTGCATCTGTTAGCCTTGTGA |
| SEQ ID NO: 1027 | ATTGGATCGACTCCATTCTCCTCCTCCAGGTGGTGATGGCAACGAGCAACAGGAACACACT |
| | CCTTCCCCAAACACCTCACCCTCCACCTTCTCAAATTGG |
| SEQ ID NO: 1028 | AACCATTAGTGACAAAAACAGGTTTGTAATTTTGGAAACCTCAGAAGGTTGCTTCCAATTT |
| | CACAGCAATATGGCTAAAGAAGAAAAAACAGGTATGCTA |
| SEQ ID NO: 1029 | CTATTTCAGTAAAAATAAATAAATATGGTGCGCGCCTGTAGTCCCCCCTACTGGCTGGCGC |
| | GGGAGGATCGCTTGAGCCCAAGATTTCCAGCCTGAGCGA |
| SEQ ID NO: 1030 | AGAGAAATGCTTCTGGACGTTGCCAAATTCCCCCAGGGAAACAAAATTGCCCTCGGTTGA |
| | GAACCACTGAGTTACAGGGATAAAATTATCAGATGTGTTC |
| SEQ ID NO: 1031 | TCCCCAACAAATAAAGTTGTAAAGTGGAAATTGACAACTAAAGATAAATAAGAAAATCTA |
| | TAAGCAGAGTGGGGTTATTTTTAACACATCTCTCTCAGTA |
| SEQ ID NO: 1032 | AAAAATAAAATTTTTTAAAGAAAGAAAAAATAATTGATAATAATAATAAAATAATGGTTA |
| | TTCGAACTCCGTTGGTCATCAAGGCTTGTGTTGCATATGG |
| SEQ ID NO: 1033 | AACTTCCTCCTCTCCCGCAGGATTAAAAAAAAGAATTAGCTCACATAACTATAGAGGCTAG |
| | AAAGTCCCAAGATCTGCAGGGTGAGTCAACAAGCTAGAG |
| SEQ ID NO: 1034 | TTGAGTTAATGACAGATTGTTTTCTTTTGTTCCCCTAGTGTTCTACAAAGTGCTCTAATTCA |
| | CTGTTAATGAGGCTCCAGACTGCATTTCCACCATTTGT |
| SEQ ID NO: 1035 | AAAATACTTATCTATTGGGTTATCCTGCTAGACAAAAATCTTAGAAAGCTCTAACATTAAT |
| | CTAGAGTTTTTAAAAGGGCAAATTGTAGAATCTAAAGAG |
| SEQ ID NO: 1036 | TTAAAACTTCTAAACTCTTAAACAAATTATAAATACTTGATACTTTGAAGAACTGCAAAAC |
| | AAAATGTTTTTAAGTTTTCATAAGGCAAAATCATTGAGT |
| SEQ ID NO: 1037 | CACTTTGGGAAGCTGAGGCTGGCGGATCATGAGGTCAGGAGATTGAGACCATCCTGGCCA |
| | ACATGGTGAAACCCCGTCTGTACTAAAATACAAAAAATTA |
| SEQ ID NO: 1038 | GTAAAAATGAAATACTAATAATACTTCAGACTCATACTTGTCCACCAGTCGGGGAAGTGCA |
| | GGGACAACACCAGTAATGAAGGATTTCCCCCAAGTCATG |
| SEQ ID NO: 1039 | AAACTTATTTTCCAAAAATAATTTTTAAAATTTAAAAATCTGAAAAAAGAGAAGAAGAATT |
| | GTGACTTTTACAATACTTGACATTAGATGGATAGAGACT |
| SEQ ID NO: 1040 | CCTATTCCTCCACAAAAAAAAATCCCAGCTCTGTCATTAACTGCCTGTGGAGCCTGGGCCA |
| | GGTTCTTCTCTGAAGTCTCCACTGTACAAACTGTAAAAT |
| SEQ ID NO: 1041 | TCATTAAAAAGTCAGGAAACAACAGATGTTGGAGAGGTTGTGGAAAAATAGGAATGCTTT |
| | ACATCGTTGATGGGAGTGTAAATTAGTTCAACCATTGTGG |
| SEQ ID NO: 1042 | CCACCACTTTGGGGGATGTCTGCACTCCCCTCTATCCATTCCCACTCAGTTACTTCCATTTC |
| | ACTCAACAAATATCAATGGACAGCATCCCAGTGTCCCC |
| SEQ ID NO: 1043 | CTCATTTACATATCGTTGGTGGCTGTTTTTGTGCTACAAAACCACAATCAAGCAATTGGAA |
| | CAGAGAGCTCATGGCCTGCAAAGTCAAAAATATTACAAT |
| SEQ ID NO: 1044 | AGAAACAAAAAAATAAAACATGGTATGATGCAATTTGTTTATTTTTAAGGCATTTATATTA |
| | GTCTTTGCAGGGGAAAAATGCTCTGAGCTAATGAACAGT |
| SEQ ID NO: 1045 | AAATTGTGAGTGTTAAAAATTAGACCAGCCTGTCCAACATGATGAAACCCCATCTCTACTA |
| | AAAATACAAAAAACTAGCCGGGCATGATGGCGGGCGCCT |
| SEQ ID NO: 1046 | AAAAAAAAAAAAGAGCAAGCAACCCTCATAAAAAAATGAAATAACTTAAAAAAAAATAG |
| | CCACCCTGAAGATGTATAGTTACAGGTCAATGGGATAGCCA |
| SEQ ID NO: 1047 | GGCATTTTGTAAAAGAAAAGAAAAAAACACAGAGAGTACTAAGCGCACCCTGAGAGTTTC |
| | GGATTCAGAATGAGGTGGAAAAGTCAGAATTAGGTGAAAT |
| SEQ ID NO: 1048 | TTGGGGGAATAAAAAAAAAGGATTGCAGGTGAGCCCCCATATCCCTGTCATCTAGGCACT |
| | GCACTGCCCATCCCCCTGTCTGCCTGCCAGTCAGTCTTGT |
| SEQ ID NO: 1049 | GCAATTTTTTTTTAATTAAAAAAAAATTGTTATTTTAAAACAATGGACTAGTTTTTAAAATG |
| | TGGATATTTATAGTGTTTAATGATATGAGACATTAACT |
| SEQ ID NO: 1050 | GCCACATGAACATTTGTAACTGCAAGGGAGTCTGAGAAGCATAGGACTATTGCTGATTCCA |
| | GGCAAATTAGGGTTCTGTTAGTAAGGTAGAGGGGAAGAA |
| SEQ ID NO: 1051 | ACGGATTTGGAATAGAGTAAGATAGGGATATATTTATTCTCTTAGTAGCTGGTGCAAAGAT |
| | TCCTTTTTGGGGGAAACGTGTCTTTGTAAAATTACTTCA |
| SEQ ID NO: 1052 | CATGGAGAAAAAATAAAAGGTAGACACAACCAAATGTTCTTTGAGGGTCAAACGTTATAG |
| | ACCCCCGAAGAAATGTCTACCAGGAACCATTTCTGGAATA |
| SEQ ID NO: 1053 | AAAACAACAACAACAACAAAGAATCAGAAGAGATACTAGGCTATCTAATTCCTAAATCCA |
| | AACCTGATATTTCTAAGTAAGATTATAAGAATTTTTATTG |
| SEQ ID NO: 1054 | AACCTACTGCAATTTTATTAAAAGCTGATCAATACTTCAAGTAAAACTCGTTGTAAACATA |
| | GAGATTCAGACTTTGGTCCTATATCAATCAATGCACTCC |
| SEQ ID NO: 1055 | GTTTAAAAACAATCTTGAGGTTTGTTTAGGATAATAGCAATTGTTGTCTAGGAGTTAAGCT |
| | TGGAGAAGAATGGAAAGATCTTGAATGTCAGAACACAAA |
| SEQ ID NO: 1056 | GGAGAAGTAGGAGCAGAAGAAGGAGAAGGAAGGAAAGAAGAAGAACAAAGCTAGAGGT |
| | ATTACCCTACCTGATTTCAAAGCTTATAAACTCTCAGGTGTG |
| SEQ ID NO: 1057 | GTTAACAACAAAAAAAAAAAGCAGGAGAGCAAAATAAAGAGAAAAGTAGAAATCAGGCA |
| | TTCAGAAAACAAACAAAAAAAAACCAATACAATAAGTAAAT |
| SEQ ID NO: 1058 | CCCCCCAAAAGTCAATAAAAAACCAAAAACATGTTACTGCTACAGAAGTTATAGACCATG |
| | GAACACAATTTGAGGAGCACAGATTTAGGTTACTTAAAGT |
| SEQ ID NO: 1059 | TAAAAATTATTTAAAAATAAATAAATAAATAAATTGCACTCCTTATAGAAAAACAGCTTAC |
| | TGTCGCCTGTCCCAAGTGAGTGAGTTTCAGATGAATGAG |
| SEQ ID NO: 1060 | GACATACTCCAGATAAAGGCAGACATCGCTCCATGTTGGCCAATGTCAGGACTGCTTATCT |
| | CTCTCTTTTTTTATTGTTATACTTTAAGTTCTGGGATAC |
| SEQ ID NO: 1061 | ATAAAAATAAGTAAAAAAGAATAGGTTAATAAATTGTAATATATCTATAGGTATGGGATA |
| | GCATTTCTTATAAATGAAGTTTTGGAAAAAGATTTTAAGA |
| SEQ ID NO: 1062 | AGAAAAGAAAGATTGGGGAGAAAAGTACAGTGTAAATATTTCTAGAAAATTCCTGAAAAT |
| | GAAGATAATTTTATTTATTGATTTTGATGGTATGTTTGAT |
| SEQ ID NO: 1063 | AGGGGGGTGTGGGGATGAAGTATGGTTTGAATGCCACCCTCTAATGAAGCATTTCCCATCC |
| | CCTGACCCAATGTGAGCTCTCCTTTCTCTGAAACCCCGT |
| SEQ ID NO: 1064 | CACTCTAATTATAAAAATTTTCATCTAATGCTCAAGGGCTTGGAAAAGATCCTAATGGTTA |
| | TTTTATCTCCATTAAAGGCAATTGGATGTGCTTGTGCCC |
| SEQ ID NO: 1065 | AAGAAGTAAAAAAAGAAGGCTGAGCATGGTGGCTCACACCCGTAATCCCAGCACTTCGGG |
| | AGGCCAAGGCAGAAGGATAGCTTGAGCCCAGGAGTTTGAG |
| SEQ ID NO: 1066 | AAAAAAAATTGACCTAGTACTCAGATTTATATAGTGAAATCTTAAATTTTGCTATCTCGCA |
| | AAGTAAAGTTTGTCATGCTTTTTCATATTCCTCCAGGTA |
| SEQ ID NO: 1067 | AGAAAAAATAAAGAAAAACGAAAACTCTCAAATAAAGTTAATATAACAAGGATTAAAAT |
| | ACCTAAGAAAAACTGAATACAAGTTTTTGAAAAAACACCAC |
| SEQ ID NO: 1068 | CCCACTTCCCAACCACCCCCCAGCAAAAAAAAAAAAAAAAAAAAACAGGAAAAGAAAAA |
| | AAAAGCATATCCCTAGAGAACACTGGCTTTTCATCATTTTT |
| SEQ ID NO: 1069 | TTAATTTTATATCTGTTATGGTGATCTGTGATTAGTAATCCTTGATGGTACCATTGATGAAA |
| | GTCAAAATTACAACAAATTTAGATTAAAGATATGAATC |
| SEQ ID NO: 1070 | AGCACTAGATTCTTCTAGACACCTCCGCCAAAGCACTTTGCCTGTTCTCTGGGCTTGTAGG |
| | GGCTGAGAGGAAGGTGGTGATAGTGAGCTTTCCACAAAG |
| SEQ ID NO: 1071 | CTCCTATCAAAAAAAAAACCCACAAAAGACTTGAACTCTAGAATCAAGTTGGCTGATTTTC |
| | TATTCTAGGTTAGCACTTCTCGAGTGGGTAACTTTCATC |
| SEQ ID NO: 1072 | CGAATTCAACTGAGTATCCAGTTTCATACAAATAATAATAACATCTTCTATAAAATGTATT |
| | CTTGTGTATTAACACATGGGGCTCTGTAGTACTCCAGCT |
| SEQ ID NO: 1073 | CACCAAAAAAAATTTCATTAAGTTTAAAGAGATTGAAATAACTGTGTTGTCCAATGACGAT |
| | GTAATTAAATTAGAAATAAATAATACAGTAAATTTGGAA |
| SEQ ID NO: 1074 | ATATGTAAAATTTTTAAAAAATTAATTGCTTTATTTGTTGATATTTTGTCAACTAATTAAAG |
| | GATAGAAGTATATTTATTATTACAGCAGTAAAATATTA |
| SEQ ID NO: 1075 | AAAAATAGTTTCTTTTTTTAAAGGTATCTTTTCAATATTTTCAAGAAATATGATTTTATCAC |
| | TTCTATATGTAACTACTCCAGTAACAAATTAAGTGAAA |
| SEQ ID NO: 1076 | ACCACCCCTGCCAAAAAAAATTGATGAGATGATATCTCTCTCTCCTCTGAGATACTATAAC |
| | TTGGTTTGTATTTAGTAACATTTATTTTTTTTGAAGTTT |
| SEQ ID NO: 1077 | ACATTAAAAAAAAAAATCCTTTATTTTTAACTTTGCCTTCAAAATTAAGTTCAGCATAGATT |
| | GTTAAATATAATAATATCCAAATTAAATATATCCAACA |
| SEQ ID NO: 1078 | TTGGGGTATAGAATGGTTGCAACAAAAAGTAGATCAAGGCTGGGTGTGGTGGTTATGTCT |
| | GTAATCCCAACACTTTTGGAAGCCAACGTGGAAGGATCGC |
| SEQ ID NO: 1079 | CTGAATTTAAAAAATAATAATAATACATTTGTGTCTTTTTGAGCGACTAATCTTGTCATACT |
| | TGTTACAGCAGCAATAGAAAACTAATACAGCAGCAGTA |
| SEQ ID NO: 1080 | CCCAGCCAATATACACACAAAGACGATGCAACTAATCCTCTCAGAAAGCAATCTCAAGTTT |
| | ATAGAACAAATCTCTCTCTTTACATGTATTCTTTTCCTT |
| SEQ ID NO: 1081 | TAAAGAAGAAAAAAAAGCCAGTGGGACTATTTAGAATCTACTTATAATGTGTTTCAAAGC |
| | ACTGTGTTTTGACCATCTTTCAGATCAAGAAGGATAAAAA |
| SEQ ID NO: 1082 | AACACACACACACACACACACACACACACACAAACACACACACACACACACAAAAGAAC |
| | CCCTCTTCGATCAACACATGTCTGACATAGGTGGAGTCTTT |
| SEQ ID NO: 1083 | ATGCAAAAAAAAAAAAAATTAGGGGTCCAAATACAATGCCTCAGGTCTGTAATCCCAGCA |
| | TTCTGGTAGGCCAAGGTGAGAGGATTGCTCCAGGCCAAGA |
| SEQ ID NO: 1084 | CAGGATATTTTTATTTTTAATCCTTTAATTTAAAGTGCTCAGCATGCCAAAGTGCCATACTT |
| | TGAAGTATCACTTTCTGAGCCCCAATAGAAGTATAATA |
| SEQ ID NO: 1085 | TAGTAAAACACACAGATCTTAAATATATAATTCAATGGCTTTTTACAAATATCTATCTGTA |
| | GCCAACACCCCAATCAAGGCAGAAAACATTGCCACCATT |
| SEQ ID NO: 1086 | GAAATAAAAAATAAAAAGAGCATAGTACTCTTACATGCTGTCTACAAAACAAACCCATTG |
| | TACCTATAAAGGCAAAATATGCTAAAAGTGATAAAGAAGG |
| SEQ ID NO: 1087 | TCTGGGGGAAATTTTTTTTAAATGCTAGCAAGAGATTACAAGTGAAATATGATTCATACCT |
| | ATAAATAACTGCTTTAGAAAGGGGCCAGTCTTGTTTTTA |
| SEQ ID NO: 1088 | CCCCCACAAAGAATAACATTAATAAAAAAGTAAGAAAATGTAACATAAATAGAAAAGAA |
| | CTGGCTTATTTACCCAGGTAACTACTCAATCCACAATGAAC |
| SEQ ID NO: 1089 | CTATGCAATCTATGCAGGTAACAAAACTACACTTGTACCTTATAAATTCACACAAATGAAA |
| | GAAGACAACATGAATAAAAAGGAATGAAAAGAAACAAAA |
| SEQ ID NO: 1090 | AAGGCCATCCTGCTGTGCAGATAGGAGATGAGTGAGGCCGGAGGAGTGGCAGGAGGAGG |
| | TGCCTAGGCCGGTCCTCATAGCTTTGTCCAGATAGAAGGAA |
| SEQ ID NO: 1091 | TATCACTATAAAATCTGAATAAGAAAGCAAGTATTAGTAAAAATGGGAGAAAACTTCCTT |
| | TGAAAAAAAGTTGGTAGCTCTAAAGAAAACAAATTTTAGT |
| SEQ ID NO: 1092 | AAAACATTAATAATAAAACTAGTTTTCTAAAGAACAGCTACTCGTTTGCTATCTCTTCTAGT |
| | AGACGTAGGGAGTTCAAACTGTTTTCACCATTACTGCT |
| SEQ ID NO: 1093 | CTGCTACCAAAAAAAAAAGATTGAAAATATGTTCGAAGAACTAAAGAAAATTATGCACAA |
| | AGAATTAAAAGAAAATATAGAATGATGTTTACAATGACAA |
| SEQ ID NO: 1094 | CCGATTTTTTAAAAAAGAAGAAAATCATTTCTAGAAAGTATCAAGATAATAAAATGATTTG |
| | GAAATTTTAAAAATATACCAGAAAAATTAGAATATGTAA |
| SEQ ID NO: 1095 | AAAAAAAGTTTTCATATAGATTTGGTAGAGATTGTTATACGTTGTCCCAAATAAAACTGTG |
| | TCTTTATGTTTTTAAATAAAACATTTCTTAGTTAGCGTA |
| SEQ ID NO: 1096 | TATGGAGACTGAATATTTCAGTAAAAAAAATTATATATATATATATATATATAAAATAAAT |
| | AAATAAAATACTAATTGGATTGTTTGAAACACAAAGAAT |
| SEQ ID NO: 1097 | CCCCACATGCTATAAACTAAAAAAAAGAGGCTGGGCGTGGTGGCTTATGCTTGTAATCCCA |
| | GCACTCTGGGAGGCTGAGGTGGGTTGATCACTTGAGGTC |
| SEQ ID NO: 1098 | CCAAGATTTAAAAAAAGACAAAGAAAGAGGCAAACATAGAATCTAGGGAAGCATGTCTCT |
| | AACAAAGGAGAGTAGCAAAAGAAGTGCCTGGCTGAAAACC |
| SEQ ID NO: 1099 | CTGAACAAAAAAATAAATAAAAAATAAAAATAAAATTGGTTTGATAGGGTCACTCACACC |
| | TGTAATCCCAGCACATTGGAATGTCAAGGTGGGAGATCGC |
| SEQ ID NO: 1100 | CTGAACAAAAGAAAATAAATAAATAAGAAGAAGAAGATATGGCCAAGAGAAAATATATT |
| | ATATTCAGAGCATATTATGAGAGTCATTTTTCTGGGTACAT |
| SEQ ID NO: 1101 | ACACACACACAAACACACACACACACACACACACACACACACACACAGAGATAGATAAT |
| | ACAGAAGCTGTGAGAGGAGATAAAGATTACTTAGTTTACAT |
| SEQ ID NO: 1102 | AGGAGTATCACTTGCATCCAGGAGTTCAAGACCAGCCTGGACAACGTAGTGAGACCCCAT |
| | GTCTACACAAAATTAAAAAATTAACCACGTGTGGTAGTGC |
| SEQ ID NO: 1103 | AAAAGAAATTAAAAAGTAAAAACAAAAAAAAAAGAAAAGAAGATAAAACAAAAGCAAA |
| | TAAAAGAAAAAAGAAAAGTTACCTGAAATGAATTGCAGCCTA |
| SEQ ID NO: 1104 | CTGAAGTTTGTTGGAATAAAAAAGAAAAATGGATAAAAGGTTTTTAAAACAGAAAGGGGA |
| | AAAAAACAGGCCTAAGAGAGGGGTCTCCCCCAGATCTCAG |
| SEQ ID NO: 1105 | CTCTCCTCTACACATAAAGAAATATAAGATATAATTTAAAATATAACAAAGAAGAGACTA |
| | TCAATTTAACCAGTGAGTTTGAAAAATAACTTAATAAAAT |
| SEQ ID NO: 1106 | ATGAAAAACAGCTTTCCCATACACACACAGTTATTTACATATTACTGTATTAAAAAGTACA |
| | TACAGGCTGGGCACGGTGGCTTACGCCTGTAATCCCAGC |
| SEQ ID NO: 1107 | TAAAACTAGTACCTCAATTACCCATGTATCCATACACTTGAAACTATACCCATTAAACACT |
| | AACTCCCTGGCCGGGCACGGTGGCTCCTGCCTGTAATCC |
| SEQ ID NO: 1108 | AAAAAAAATTAACATGTTAAATTTCAGGAAAGGTATCTCTCTATTAGCCCCCACTTATTCT |
| | TTCATTTATTCATTCTGCATTTATTTAGCATTATCATTT |
| SEQ ID NO: 1109 | CAGTAAAAAACAGAAAGAAAAAATTATCCTAAAATTGGCTGTGGTAATGGTTGCGCATAT |
| | GCTGTGAATAGGCTTCCAAATATTGAAATGTCCACTTCAA |
| SEQ ID NO: 1110 | TGTGCAGATAACAAGAGTAGCTTGATTCATAATCACCAAAAACTAGAAACAATCTAAATG |
| | CCCTTTGTTGCTGAATGAATAAACAAACTGTGGTACATTC |
| SEQ ID NO: 1111 | GTCTTCATGGTTGAAGAACAGGTCCAGGCCGGGCTCGGCAGGTCACGCCTGTAATCCCAGC |
| | ACTTTGGGAGGCTGAAGCAGGTGGATCACCTGAGGTCAG |
| SEQ ID NO: 1112 | CTGAATATAATTTTTTAAAAAAATAAATAAAAGTAAAAACTACAAATCACATTAAATGCA |
| | GGTATCACTTATATACTCCAATTACTCTATTGTTCTCCAA |
| SEQ ID NO: 1113 | CCCATGTGGAGAGAGGCTGAGAAACAATCAAAATACACATTCTAAAACTCCCAACGATTA |
| | GAGATTGTTTTTTATTACTAGTTCAGTTTTGATGATATGA |
| SEQ ID NO: 1114 | AAGGAAAGAAAGAAAGAAAGAAAAGGAAAGGAAAGGAAAGGAGGAAGGAAGGAAGGA |
| | GAAAGAAATAAAGAAAGAAAGAAAGAAAGAAAGAAAAAGAAAA |
| SEQ ID NO: 1115 | AGGAATTTTAAAAAATACATTATTGACTTACTTTTCTTTTAAACATAACAAAGTACTGCAT |
| | AATATTAAATTAGACCTTTTGATCTGAAATGTAACTATT |
| SEQ ID NO: 1116 | TTGAAAAAAATAAAAAAGAAAGAAAGAGAGGACTAAATAATGAGAGCACACCTTAGCCA |
| | TTGTTTGTCTACTTTGACTAAGAGCATAGTAGAAATGCATT |
| SEQ ID NO: 1117 | CCAAAAAAAAAAAAAGCAGGCCTAGAATATGGAATATATCAGTCAAGATAGGCCAAGTTA |
| | TGCAGCAGAAACAATTGGAAATAATAGCAGTGAAGCACAG |
| SEQ ID NO: 1118 | ACTCCTTGTCTAAATCAGAGGTTGCAGCTCTGGTCATGTTATATTAGATGATTCCGCACTCT |
| | AAACCTCCGTAGTAGATCCTGCCCCACCTCAGGGCTAT |
| SEQ ID NO: 1119 | CTGAACTTTGTTAGTAAAAAAATATATATTAAAAAACAACAACAACAACAACAAAAACAA |
| | CTCGGGTGCGGTGGCTCTCGCCTGTAATCCCAGCACTTTG |
| SEQ ID NO: 1120 | ATGCTATTAAATTTCACTGGAAAGCCCCCTATGCTATTAAATTTCTTTAAATGAAAAATAA |
| | AAAACAATTGAGTCAAATAAATTAAGAAAAAATATTCTA |
| SEQ ID NO: 1121 | CTTGCAATAATCATTTTTAAATGCTAAAAGAATATACATTTATGGTAAAAGAATAAAATTC |
| | CATTTTAAAAGCTTTCGTAAACTAAATAATTTTTTGTAA |
| SEQ ID NO: 1122 | TTATATTTAAACAGAGGAAACTGGGCTACATGATTTCTTCATTCCCTCTAAGAAAGAAATG |
| | TTTTGCCTACCTCACTTCTCATATTTTGGAAATGAACAT |
| SEQ ID NO: 1123 | TTTCCTTTTCCTAATCACCATGCTTCTGCCAGCAACTTACCAACTCAATGAATGCCTCATCC |
| | ACTGCCACAACGCCAGACACCCACATTGCTTCTGATCA |
| SEQ ID NO: 1124 | TGGCTGCTGTATTACTCTGTCACATGTCTTGGGAGAGGTCCAGTTTCTGTCACCCTAGCATT |
| | AACTGAAAAGCGGGATGAAATATGAAGACATTTTGCAG |
| SEQ ID NO: 1125 | AGAAACAAATACAAATAAATACAATAGGCAAAATACACTTTTATATTATTTAAAGTTTTTA |
| | AAATGGAAAAAGAAAAGCATTTGGCCCTTTGAGTATAGC |
| SEQ ID NO: 1126 | AAATGAGTGAATAAATAGAGAATACTCCTTATGTTTTAAAATCCTCAGATCAAAGAAGTG |
| | ATCTTTCTACTGTGGGCTTCATTCAGCCTCCGGACAGGCA |
| SEQ ID NO: 1127 | TAAGAAAAAATTTTTTTCAATTGGTAATTTAAAACTGATTAATACCACTATGCAACTGAGA |
| | GAGTGAAAATGTCTGTTTCCTGTCAATTTTTCAACTGAA |
| SEQ ID NO: 1128 | GAGAGACAGAGAACAAAAGAAAAGAAAGAAAGTAAGAAAAAAAGAAAGAAAGAGAGAG |
| | AGAGAAAGAAAGAAGGAAATAAAGAAAGAGAGAGAAAGAAAA |
| SEQ ID NO: 1129 | GCATCCTCCCTGAGGGATTTTTTTTTTAAGTATACAATTCAGTGATTTTTTAAAAGTATATT |
| | CATGAAGTTATGCAACCATTGTCACTATCTAATTGCAG |
| SEQ ID NO: 1130 | AGGAAAAAAATCTAGGTACATAAACCCTGGGACCTTGCTTTCTAAATTTGCCATCTAACAT |
| | CTGATTTTGACCCTCAGGGTTGTAGTGTGAAATGATTTG |
| SEQ ID NO: 1131 | TTGGGGAATAATAACATTTTAAAAAATTACTTGTAAAAATATTTTTTAAAGATGTTAATTG |
| | AAATCCCTAGGGCAACCACTAAGAAAATAACTTAGAAAT |
| SEQ ID NO: 1132 | TTTGGTTGCCTTGACTCCTGATTCATGTCTTTACGTTCTCTTCCTCAACAAGCTTCTTAATAG |
| | GTATTTTCTTCCAAAATAGGTTTTTTTTTTTGTTTTT |
| SEQ ID NO: 1133 | AAAAAAAAAAAAAAAAAATTAGCCAGGCGTGGTGGTGTGTGCCTGTAATCCCAGCTACTT |
| | GGGAGGCTAAGACAGGAGAATCACTTGAACCCAGGAAGCA |
| SEQ ID NO: 1134 | AACCACCCCGATGCGAATCAGGATATTGCCAGCATCCCAGAAGCCCAGCCCCCTGAGCCC |
| | CTCCCAGCCCTGTCAGTCACTCCGATCCCAGCCCTTCTGG |
| SEQ ID NO: 1135 | GCCTCCCAGGTTCAAGCAATTCTCTTGCCTCAGCCTCTCAAGCTGGGATTACAGGTGCCAG |
| | ACACGTTGCCTGGGTAATTTTTTTGTATTTTTAATAGAG |
| SEQ ID NO: 1136 | TGAGAAATTTATATTAAAAAGAAAAAGAAAAAATAAAACATGCCTGTGACAATTAATGTA |
| | GTCTTCTACACTTGATCTTAGCCAAAACCTGAGAAGCAAT |
| SEQ ID NO: 1137 | CAAAAAAAAGGGAATTGTATGAGGTGATAGATATGTTAAGTAGTTTGTGGCAATCATTTCA |
| | CAATGTATACATATATAAAACCATCACCTTGTACACTTT |
| SEQ ID NO: 1138 | GTGGAGGGTCCTGTCCCTGGGGAGACCAAGCTGGCAGGTGCTTTTTTTCTTCCTCTTGGCCT |
| | CTCATCAGCAGCCCTGTTTAAACCTTCTTGGATGGTCT |
| SEQ ID NO: 1139 | TACAAAAATATGTAGGTCTATTTCATTTTCACTACAATATAGTATTCCATTTATGTAATTTC |
| | TTTTTTTGACACAGAGTCTTGCTCTGTTGCCCAGGCTG |
| SEQ ID NO: 1140 | CCGGGGATACAAAAAAAAAAAAAAAAGAATTAAAAGAAATATCACCTAAATAATGCTTTT |
| | CTGTGTATTTACTAGTATATTTTCAGAATACCATTAAATA |
| SEQ ID NO: 1141 | ACTTGTTGTGTAAATTAGACAGTTGTGACTTTTTTTTTTTTTTTGAGACGGAGTCTTGCTCTG |
| | TCAACAGGCTGGAGTGCAGTGGTGCGATCTCAGCTCA |
| SEQ ID NO: 1142 | GAATACCATGCAGGACATAGGCATGGGCAAAGACTTCATGTCTAAGACACCAAAAACAAT |
| | GACAACAAAAGTCACAATTGACAAATGGGATCTAATTAAA |
| SEQ ID NO: 1143 | CATTGAGTTAAAAATGGACCTTTTTTATTTTTAAAAAGCTAATTAACTAGATTTGCTTACTT |
| | AAAATCAAAGCAATCAACTCGTTACAAGTCTAGAAATA |
| SEQ ID NO: 1144 | ATAGAAAACATAAATTAAAAATGTAAAAACTAAGTAATTTATATGACATAAAGTGAAAAG |
| | TACACAATTCTGTGGTATTTGGCGCATGATGTTGTCATGC |
| SEQ ID NO: 1145 | TAATAAAAATTAAAAAATAAAAGTTACACAAGTGATTTACAATAAGTTTAATTTAGGAAAT |
| | ATCAGTATTTTATGATTCCCAGCTGTTATCTCAAACATG |
| SEQ ID NO: 1146 | TATCTTTAAAAAAGAGCAAGGTACGGGCCAGGCGCAGTGGCTCACGCCTGTAATCCCAGC |
| | ACTTTGGGAGGCCGAGGCGGGCAGATCACGAGGTCAGATC |
| SEQ ID NO: 1147 | CTTCGGGGAGAGAACAACCGTTGTTTAATGGAAGATTTCGATCAGTTAGGGTACAAGCTA |
| | AATAGTTATGTTCTTGTTGTTTGAGTTGGATTAGGTGTTT |
| SEQ ID NO: 1148 | GGCATTAAAATCACTTGAACCCAGGAGGTGGAGGTTGCAGTGGGCTGAGATCACGCCACC |
| | ACACTCCATCCTGGCCAACAGAGCAGGACTCTGTCTCCAA |
| SEQ ID NO: 1149 | CTCGCAAAAAATGAACCTGTCAAAAATAAGAAGTACAACAACTTTCCAAGATACAGACAA |
| | TATAATAAGATATAAATAGAAAAAGCAAAAAGGTAAAAAG |
| SEQ ID NO: 1150 | AAAAAGTGTGGGCTACCTTTTATCACTGACCTTTGCTTGAGTCCCTTTCTAGACATTATTAG |
| | ATGGCAACAAAGAATGGAAAAGCACAAATTAAACTGAT |
| SEQ ID NO: 1151 | CGCCTCAGCCTCCCGAGTAGCTGGGATTACAGGCGCCTGCCACCGCGCCTGGCTAATTTTT |
| | TTTTTGTATTTTTAGTAGAGACGGGGGTTTCACCATGTT |
| SEQ ID NO: 1152 | TGGTCTGTAGTTAAAAAAAAAAAAATCAATGTCACAAAGGACAAGGAAATATGCAACATG |
| | TAATCTTAGATTAGATCCTGGATGTTATTAGAACAACAGG |
| SEQ ID NO: 1153 | CTCCCATGAGAAAACAACCTACAATTGGGAAAATACATAACTTAGAAAGAAAGGGAAAGT |
| | CTTTAGTGTGATAGAAATTCCTCCCATATCTGTTTCCTGT |
| SEQ ID NO: 1154 | GTTACAAAAAACAAAACAAAACAAAACAAAACAACAAACAGAAAAAAAAAGAGAGAAA |
| | AGATGCTAGAGGAAGCAGTGTGACAGACAGATCATGAGATGC |
| SEQ ID NO: 1155 | CTGAATATAATATTGTGTATATATATATTACATATAGCCTTGTAATAATTAAAGACATAGT |
| | AAATACAGCTTCTTTAAACTTCTATTCTCTCTTCTCTCT |
| SEQ ID NO: 1156 | GACTTTTAATCCATTTTTTGGCATTAATACTTTTTTCTGCTGCAAATCTGTTTAATGATGCTA |
| | ATTTGCTTAAATCATGGAATTATTTTTACATTTATAA |
| SEQ ID NO: 1157 | AGTTTTGCTCTGTTGCCCAGGCTGGAGTGCAGTGGTGCGATCTTGGCTCACTGCAACCTCT |
| | GCCTCTTGGGTTCAAGCCATTCTTCTGTCTCAGCCCCCC |
| SEQ ID NO: 1158 | ACCCCCACCCCCACCAAAAAAAAAAAAAAAAAAAAAAGATAGTTACAAATGTTTCCCAGA |
| | ATAGTTGTCCCAATCGAATCTATTTTCTCATGTGTAGTGT |
| SEQ ID NO: 1159 | CTGAACAAAAACAAAACAAAACAAAACAAAAAAACAAAGTCACATATTAGGGAAAAGGG |
| | GGACTCTCAGGAGATTAGTGCCACCCTTAAAGGAAGCAGGA |
| SEQ ID NO: 1160 | AAAAAGAAAAAAGAAAAAAATATAAATATATATATATTTTACCTATATGTTACTAGAATAT |
| | ATATTTTATATAATATATATTTTAAAATATATCTTTATA |
| SEQ ID NO: 1161 | AGTAAAAAACAAAAAAGAAAGGAAAGGAAAAAAAAAAGAAAAGCCCAGACCAGATAGC |
| | TTCATGGGTGAATTCTACCAAGCATTTAAAACTGAAGAGAAA |
| SEQ ID NO: 1162 | TGAATAAAGTAAAAAAAGAAAGAAATATAGTGAATTTTTAGCATGCAACTATTGTACATG |
| | ATGAGGGTCCATTGAGTCTAAGGGAGACCCTACGAGTGAG |
| SEQ ID NO: 1163 | TAATAAATACACACTTTTATACAGTTTCATTGGTTTGGAGGACTTTATGATGACAAGCAAA |
| | TTCAAAATCATTACACTGAAGACTCACAGAGCCAAGTAG |
| SEQ ID NO: 1164 | CATGGGAAAAAAAAATAGCGAGGAATCATATTTTCCCAGACAATTTCTTATGAGAGCCAG |
| | ATAAGATTATGCATATCAGCTCATGGTAAAAGGCAGTAAA |
| SEQ ID NO: 1165 | CTGGAACAACAACATACACATTATAAAGCTTATTGTGCTATTTCTTTAGCTATTATTTCTGT |
| | TTCTGTGAAACTTTTAAAATATTCTAAAATAATCTAGG |
| SEQ ID NO: 1166 | AACTGAAAAAAAAACAACAACAAAAAACGAAGGCAATAAGGAAATAAGGGGAGGAACT |
| | GAAGAACAGAAAAAGGAGCAGAGATAACATCCTTTAAATTAA |
| SEQ ID NO: 1167 | AGAAAAGAAAACAACAGGTACAAATATATGGATGTGGGAAGCAGCACTGTGTGTTTAACG |
| | AACTACAATTGGTTATGTATTGCTAGGGTACAAAGTGCTA |
| SEQ ID NO: 1168 | CTAAACTTTGTTGGTAAATAAAAGTTGAAAAAAAAATGACTAGGTGCAGCGGCTCACATG |
| | TCTAATCCCAGCGCTTTGGGAGGCCGAGGTGGGAGAATCA |
| SEQ ID NO: 1169 | ATGCAGAAGTAGTAAATACTGATTCATGTAAAATAATAAACAACTTTATCTTTCAGTTTTT |
| | AAAAGACAGGGTCTTGTAACGTTGCCCAGACTGGCCTTT |
| SEQ ID NO: 1170 | CTGAATTTTTAAAAGTCTAAAGAAAAGGGTTTTAGGAAGTTGTATTATAGCAGGTTGTGTC |
| | TTATGTTTGGTTTGATAAGTTATGAGCTGTTCCTATGAT |
| SEQ ID NO: 1171 | CTGAATTTTCTTGCAGTTGAACAACAGAGGCTTTTTTTGTGTGTGTGGGGGTGCTTGGTTTT |
| | GGGAGGTTGAAGAGTACTTGTTCGCAAACTCTCTAAAT |
| SEQ ID NO: 1172 | GTGGAAAACCTCTTTTCCATGAAAATAAAAAGGGATATAGAGCAAATGCAGTTCTCAATTC |
| | CTGGTACTGGGAATGTGAAGTCATTTCGCCACTTTGGAA |
| SEQ ID NO: 1173 | CTGAAAAGAAAGAGAGAGATAAAATAGGTGGGGTGCAGTGACTCACACCTGTAATCTCAA |
| | CAGTCTGGTCGGCTGAGGCAGGAGGATTGCTTGAGCTTAT |
| SEQ ID NO: 1174 | TAGTAAAAAAAAGAAAAGAATCTATAATCAAACAAGACCAAGAAACACTAGGCTAAATG |
| | AAGTTAAAAGGTCACTTTGTAGTAGAAATCATTGCAACCTT |
| SEQ ID NO: 1175 | TGGGTGTTAAAACACGGTGTTACTGGCCGGGCACGGTGGATCCCACCTGTAATCCCAGCAC |
| | TTTGGGAGTCTGAGGCAGGTGGATCACAAGGTCAGGAGT |
| SEQ ID NO: 1176 | AAAAAAAAGGATTAAATCATGATTAAAACAAGTGTGAAGAGGAGAGATAACAATTTGGG |
| | GGTTGTTTTTCCTTTATTGTCTACTTGAATTCTTGGATAAT |
| SEQ ID NO: 1177 | GATGTCAGTTTTTTTTTTTTCTAAAAGCAAACAAAAACAATTGGCTTCAGACATTTTGAACA |
| | AAACAAGCAGAAGCTGTTTTCTTTAAGAAATTACAAGC |
| SEQ ID NO: 1178 | GTGTTTAAAATTAAAAAAAAAAAAACTTTATTAAAGGCACAGAACATTAATAAAAATTGA |
| | CAATAAACTGGGCTATTAAGTAAATTGCAACAATTTCCAG |
| SEQ ID NO: 1179 | CTTCCCCTCCAAAAAAAAAAAAAAAGAAAAAGTTGAAGAATTAAGAGAAATAACACGTGT |
| | AAAATAATTTTAAATAAAATGAAAAGAGTAGTAAAAGTAT |
| SEQ ID NO: 1180 | CCTTGAAAAAAAATTTTTTTTTTTTTGAGACAGAGTCTCACTCTGTCGCCCAGGCTGGAGTG |
| | CAGTGGTGCCATCTCTGCTCACTGCAAGCTCCACCTCC |
| SEQ ID NO: 1181 | ATAAACATAAAAAACAGAAGTACTTTCCAGAGACTAGGATTACAGACAACCTGGATATAA |
| | ACTAAGTTCTGGAGGTATTTTAAAAAGAGTATTCTAAAGA |
| SEQ ID NO: 1182 | AGTTTTAAATCCACAACCACCCCACCCCAAAACAATGATTAGCACAATGAGAAACTTTACC |
| | TGAGGTTGGTTACACCCCAGATCCTTTCTTTTACACAAA |
| SEQ ID NO: 1183 | GGGAAAAAAAAAAAACAAAAAAACTTATATGGAGTTTAAAATATAATTAATTAAAAATCA |
| | ATCCTGTGGGATCACATATCTAGGGGAGACTTTAACCCAT |
| SEQ ID NO: 1184 | GTGAACTGTAAAAAAAAAGAAAAAGAAAAGAAAGACACCATTGTTTTGGATTTCAAGTTC |
| | ACTCTAAACCCAGGATGACTTATTGTGAGATCCTTAGTGA |
| SEQ ID NO: 1185 | CTCCCCTGACATAAATGGTTTTTTTTTTCCTTTTTTGAGAGGAGTCTCGCTCTGTCACCCAG |
| | GCTGGAGTGCAGTGGCACCAACTCGGCTCACTGCAAAC |
| SEQ ID NO: 1186 | CCACGGGGGGACAGAAAATAATAGATTATAGTGATCCTTCTCTTTCTGTTCATCACCATAG |
| | CAATTCATTTCTTTGATTAATCTTAGGTATGTACCATGT |
| SEQ ID NO: 1187 | GATATGGTTTGGCTCTGTGTCCCCACCCAAATTTCATCTTGAATTGTAATCCCCATGTGTCA |
| | AGGGAGGGATCTGGTGGGAGGTGACTGGATCATGGGGG |
| SEQ ID NO: 1188 | CCCAGCCAAAAGTAAAAGAAAAAAAAAGCTGCAATAGTTCTTTATATAGTTTAGATACAA |
| | GGCCCTTATCAGATATTTGATTTTCAAATATTGTCTCCCA |
| SEQ ID NO: 1189 | ACCCTCAAAAAAATTAAAAAAATAAAATAAAGAAGGGAGAACTGAACACCAGATGGGCC |
| | AAGGCTAAAAATTTCTGCCCTGGGAGTTCCAGACCATTCTG |
| SEQ ID NO: 1190 | TTTCCCCTGGGGGAGAAAAAAGAAAGGGGAACCCTCATGGTGCCCACATGCCTGTCAGGG |
| | GGAAGTCTGCTCGGGTCATCAACTATGAGGAGTTCAAGAA |
| SEQ ID NO: 1191 | CCTGACTAGCTCTAGTCTACTCCTTGTTGACTAGTTTTAACTAGCAGGAAAATAAACATCA |
| | AGAGAAACCAAGTCCTTACTGTCAGAGCTCCACACAGAG |
| SEQ ID NO: 1192 | CTCACCCACTGCCACCCAAAAGGTGTATGTGTGATCAATGAAAAGTAAGAATCAATGGTA |
| | ATACTTTTCTGTTTGAAAACACTGGAGAAATTATCAGATG |
| SEQ ID NO: 1193 | AAAAACAAAAAAATAAACAAGTTTCTCCCCTCGTTCTATGGTTTTATAGCCCCAGCAGTAT |
| | TATTTCCCAATCCTTCTAAAAAAGAAACCATAGCAACAA |
| SEQ ID NO: 1194 | TCTCCCCAGCAATACAAATAAATAAGTAGGCTGGGCACAGTGGCCCATGCCTGTAAGCAC |
| | TTTGGGAGGCCAGGGCAGTAAGATTGCTTGAGGCCAGGAG |
| SEQ ID NO: 1195 | ATCCCTCCTCGAAAAATAAAAAATGAAAAAATGGTTTTATAAAGCAAGTAAGTCATATTCT |
| | AAACAACTATGTTCACAGGTTAGCTCATTAAAGTCAGTG |
| SEQ ID NO: 1196 | CAAAAAAATTTTTTTTAAATAGTCCGGGCATAGTGGCTGACACTTGTAATCCCAACAGCTG |
| | GGGAGGCCAAGGCCGGAGGATTGCTTGAACCCAGGAATT |
| SEQ ID NO: 1197 | CCGGGGATACAACGTGTTTCCTAAAAGTAGAGGGAGGTAAGAGACGGTAGCACCTGCGGG |
| | GCGGCTTGCACGCCGAGTGCCTGTGACGCGCCGGCTTAAC |
| SEQ ID NO: 1198 | CCGGGGATACAACGTGTTTCCTAAAAGTAGAGGGAGGTAAGAGACGGTAGCACCTGCGGG |
| | GCGGCTTGCACGCCGAGTGCCTGTGACGCGCCGGCTTGAC |
| SEQ ID NO: 1199 | CCTGGGATACAACCTGTTTGCAAGGTTAGAAAGAAAAGACTGCGCCGGGTAGTTTAGGAT |
| | AGTTGGTAGGTTTTCTTACTCCTTTAAGTATCATAAGGTT |
| SEQ ID NO: 1200 | CACCCACCCACCCTCCCAAAAAAAAGGAAAAAAAAAAAGTCAAGTGGGTTGTTTTTTCAG |
| | AGATGCTACCAAAAATGTAAAAAGGTAGAATAGCCCCCAG |
| SEQ ID NO: 1201 | AAATTAAAAATAAAAAAAAAAAAAATAGGCTGGGCTCACGCCTATAATCCTACCACTTTG |
| | GGAGGCCAAGGCGGGCGGACTGCCTGAGCTCAGGAGTTCA |
| SEQ ID NO: 1202 | TTTACAAAAAAGATAAACTTGTTATATGCAGGAGACAGGAAATTGGAGGAGGGACCCAAG |
| | AAGGCCATGTCCTGGAGAATACAGCTTTCCTGGGGGCCTT |
| SEQ ID NO: 1203 | GTTGTGGTAGTTGAAATGCAAGTTTTGTTAGTTGTGTATTAGCTTTTGCTTTTTTTTTTTTTT |
| | TTTTTTTTTTTTTTTGCCGTGGAAGGTTTGTTTCACT |
| SEQ ID NO: 1204 | TGTTATTCTTTGTCAAATGGGAAGTAGCCAATGTGATTGTCTGTGGCCGTGTTTGGCTTCTC |
| | CTTGCTTGTTTCTTGTGAACTGTGTCTTTAAATTTCCA |
| SEQ ID NO: 1205 | GATCTGGCTTGTTTATAAAAGGCGTACGTTGTATCTTTGCTTCGTAGGTTTTCCTGTGTTAT |
| | ATTGTAACCTCCTGTTTTGGAATAGCGAGAGATTGATG |
| SEQ ID NO: 1206 | CTGGGCTCAAGCAATCCTCCCACCTCAGTCCGCCAAGTGCCTGGAACTATAGGCACACACC |
| | ACCACACCCAGCTAATTTTTGTATTTTTAGTGGAGATGG |
| SEQ ID NO: 1207 | CTGAACAAAAAAAAGAAAAAAATAACATTTACAAAGAATTTTAATGACACAGATTATACA |
| | TATAATGTACATATTATATATAATATATATCTTACATATA |
| SEQ ID NO: 1208 | TCCCAAAAAAAAAAAAAAAAAAAAGGTAGTCCTGTCCTCAGGAGAATCCTCATAGTACTA |
| | TAAATCAGAAAGTATTATTTCCACTTTAACAGATAAGGAA |
| SEQ ID NO: 1209 | ATTAAAAAAGGAACAAAGTATTTAATTACCTCATAGTTCTATAAGAAATTAGGTATCATTA |
| | AATATTATATAATATTCATAGCTGTTTTTATCCTTTTGT |
| SEQ ID NO: 1210 | TTTCCATTTTTTTTTTTTTTTTTTTGAGACGGAGTCTCGCTCTGTCACCCAGGCTGGAGTGCA |
| | GTGGCATGACCTCGGCTCTCTACAACCTCTGCCTCCT |
| SEQ ID NO: 1211 | TCATTTTTTGTCCTAAGAGATCATAGTGTGAAGTTTATATTATTAAAAACAAATAAATAAT |
| | AAGAAAATAGAGGCATGTAGCTTTACATGAGTTCATGTC |
| SEQ ID NO: 1212 | AAATGAAAAGTTTAAAAAAAAATAAAAGAATTAATTGCTCTTTCCTCTGATCAGAGCGCTT |
| | CACTCATCCCACTGGTGTGCACTCTCTGCATGATATTAT |
| SEQ ID NO: 1213 | AAACCAAAACCAAAACCATGTCATGCCTCTTAGCTGAGCTAAGGAAATGCATTATATGACT |
| | GTGTCCATAAACGTGTCTCTTGGCCAAGAAGCTTCCTTC |
| SEQ ID NO: 1214 | CATCGATTTTTTAAAAATCTGCTTTCATTATTTGCAGCAAGGCAAGAATCTTCTATTCAGAG |
| | CAGATGTACAATCATGGAGAGAATCCTCTGCATGGCGG |
| SEQ ID NO: 1215 | ATGTTTATTAAAAAGAAAAAATTTTTGATTCAAAGTAAATAAAGTAAAATGCACAAAGGA |
| | ACAGCCCATACCTCACCCACACATGGACAAAATAAAAGGC |
| SEQ ID NO: 1216 | AATATAGTAAAGATGTCAATTCTCCCCCAAACTGATATGCAGGTTTAATGCAATTCCTATC |
| | AAAATCCCAGCAAGTTGTTTTACAGAAACACACAACATT |
| SEQ ID NO: 1217 | CACGCAAAAAATATTTTAAAACAGGAGCCAAGCAGTGGCTCATGTCCATAATCTCAGTACT |
| | TTGGGAGGCCGAAGCGGGAGGATCACGAGGTCAGGAGAT |
| SEQ ID NO: 1218 | ACTCCCAACAAAAAAGAAATGGCCATTCAGTTGACTCTTGAACAACGAGGGAGGGGCTGG |
| | GGTGCCACCACCTGCACAGTCCAAAATCTGAATTAACTTT |
| SEQ ID NO: 1219 | GGGGGATATTTAAAAAAAAAGATTTCAATCTAGAGGCTACAGGCTGCAGATGCTGGGGGT |
| | GATCACATGAGAGAGCTCTGCTGCAGGGAACGATATGTGA |
| SEQ ID NO: 1220 | CTGTGCCCAGCTCGTGGCCTGTTCTTTGTACTTGCGGGGAAGGGGTCCCCTTCTCCCACAGC |
| | CATCCCCCCGGGGCCTGCTCCCAGGTGGGGTCTGGTTT |
| SEQ ID NO: 1221 | CTGTGCCCAGCTCGTGGCCTGTTCTTTGCACTTGGTGGGGGGGTTCCTATCTCCCACAGCTT |
| | TTCCCCCCGGGGCCTGCTCCCAGGTGGGGTCAGGTTTT |
| SEQ ID NO: 1222 | TTAAGAAAACTAAAAAAAAACAAAACAAACAAAAAAAAAAACTAAAAAAAAAAACCCTA |
| | CATCTTTCTTTCTTTTTTTTTGAGACAGGGTCTCACTCTGT |
| SEQ ID NO: 1223 | AAGGAAAACCTCTTTTTCATGAAATAAAATGAAATAAAACAATTAAAAAATAATAGAGAG |
| | ATCAGAACTTCCCACTAGAGCCATTAGATTCAAAGCTAAT |
| SEQ ID NO: 1224 | CTCAAAACAGAGATGAACTCCCTACTTAAAAATGAGGATATGTGTGCTTTTAATGTCATGC |
| | AGAATCATACAGATTTCCATTTCATTGGACCCTTAGAGG |
| SEQ ID NO: 1225 | TAATGCTATCACTCCCCTTAACCCCCACTCCCTGACAGGCCCCAGTGTGTGATGTTCCCCTT |
| | CCTGTGTCCATGTGTTCTCATTGTTCAACTCCCACTTA |
| SEQ ID NO: 1226 | CATTGAGTTAAAAATGGACGTTTTTTTAAAAAAAGCTAATTAACTAGATTTGCTTACTTAA |
| | AATCAAAGCAATCAACTCGTTACAAGTCTAGAAATAAGG |
| SEQ ID NO: 1227 | CCCCACCAGCCCCCGTCCCCACCCCCCAAAAAAACAGAACCCCACATCACAAACACCCCC |
| | AAGCCCTGGCCCAGGTCTTTCGGATAAAGGGGGCCACTGC |
| SEQ ID NO: 1228 | CAAGTAAATAATAATAAATAAATAAATAAATAAATAAATAAATAAATAATGATTAGATTA |
| | AACTCCAGATCTTTCTGACTCTGAAACCAACTTTCTCCTA |
| SEQ ID NO: 1229 | GAGCCATTCCAGAGATCCAGGAAGCAGGAATCAACGGACTTGCACCTCCAGGTGTTTCAC |
| | CAGCATGAATCTATAGAACTCATATTCCAAGAAGGGTGTT |
| SEQ ID NO: 1230 | TCTCCCCCTAAATCAGGCTATCAAAATTTGCAATGAACAAATAGGACCCAGCTTATATTAC |
| | AAATCTTTGCTGTGATGAGCTGAAACAGGAATATTCTAC |
| SEQ ID NO: 1231 | AAAAAAAAAAAAAAGAAATGGATTATTGAAAGGGAATGGAGATGAAGAAGTTAGAATAG |
| | GTTATGTCAAGGATCCATGAGGTTTGGGTGTTATATCATCA |
| SEQ ID NO: 1232 | CCAATAAGAAAAAAAAATTAAAAGAAAAGAAATCACAAATAAAGTTATAAAATACTCCA |
| | AGATGAATGAAAACAAAAACAAAACATGCCAAAACTTATGG |
| SEQ ID NO: 1233 | TAAAATAAAAACAAAGAAGTCAACGTAATACAAAGCAGAAAAACAATAAAGAAAATCAA |
| | TGAACCCCAAATCTGGTTCTTTCAGAAGAGCGATAAAGTTT |
| SEQ ID NO: 1234 | ACATAAAAAGGAAAAAGAAAAAAAGGAAAAAGTAATAAATTAGTATGAATTGAGCATTT |
| | TAATGATTCTATTTTATTGCCTTTGTTGGCTTATTAAATAT |
| SEQ ID NO: 1235 | AATAAATTTTAAATAAAAAAATAAAAAAAAAGAAACCTGGAACAAAGACTGATTCTGCTC |
| | TATGAAGCCTGTTCTATGAAGGTTCAACCTGCTCACCTGC |
| SEQ ID NO: 1236 | AGGGGAAAAAGAAAAAGGAAATAGACGAGCACATTTGACATTTCTCAGTGGCGTGGCAG |
| | ATCTCTAGGGCTTTATCTCCTTGTCTCATTCAGAGTGTGCC |
| SEQ ID NO: 1237 | CTAAACTAAAAATAGAAATGAAGAAAAAAGAAATGGAAGTTCATAATTTAAAATTTTTAT |
| | TTTTTTGTACAAATTGATGGGGTATAAGTGAAATTTTGTT |
| SEQ ID NO: 1238 | TGAACTTCAAGGATCGATTTAACACTTGTATTTGTGGGCTTGTTACTTATGATAACAGGTG |
| | GCCTAGTTTCATGGCTTTGTGTTTACCGTTTTCGGGTGC |
| SEQ ID NO: 1239 | TTTCTGACGATCACTTACATTTGTGTTATGCTGATTAGCAGATATCCACAAACATAGCTATG |
| | AAGTTCTGACTGGGATAACCTTGCTGTTTGTCTATTTT |
| SEQ ID NO: 1240 | ACCTTATTCACGCCTAAAAAGTAGACTGACTGTGGGGTGGTCGTGTTTTTTGTTTCTTGTTG |
| | GTAGGTGGTGAATGCGTTTTTTTCGTTGTTTTCTCCGT |

[0171] In some embodiments, a termination sequence may have at least about 70%, at least about 75%, at least about 80%, at least about 83%, at least about 85%, at least about 87%, at least about 90%, at least about 91%, at least about 92%, at least about 93%, at least about 94%, at least about 95%, at least about 96% at least about 97%, at least about 98%, at least about 99%, or about 100% sequence identity to any of SEQ ID NO: 60, SEQ ID NO: 708-SEQ ID NO: 1240, SEQ ID NO: 1242, SEQ ID NO: 1243-SEQ ID NO: 1247, SEQ ID NO: 1254-SEQ ID NO: 1257, SEQ ID NO: 1264-SEQ ID NO: 1272, SEQ ID NO: 1275, or SEQ ID NO: 1287-SEQ ID NO: 1289. In some embodiments, the termination sequence comprises a sequence of SEQ ID NO: 60, SEQ ID NO: 708-SEQ ID NO: 1240, SEQ ID NO: 1242, SEQ ID NO: 1243-SEQ ID NO: 1247, SEQ ID NO: 1254-SEQ ID NO: 1257, SEQ ID NO: 1264-SEQ ID NO: 1272, SEQ ID NO: 1275, or SEQ ID NO: 1287-SEQ ID NO: 1289. In some embodiments, the termination sequence is selected from SEQ ID NO: 60, SEQ ID NO: 708-SEQ ID NO: 1240, SEQ ID NO: 1242, SEQ ID NO: 1243-SEQ ID NO: 1247, SEQ ID NO: 1254-SEQ ID NO: 1257, SEQ ID NO: 1264-SEQ ID NO: 1272, SEQ ID NO: 1275, or SEQ ID NO: 1287-SEQ ID NO: 1289. In some embodiments, a 3′ box sequence element of a termination sequence of any of SEQ ID NO: 60, SEQ ID NO: 708-SEQ ID NO: 1240, SEQ ID NO: 1242, SEQ ID NO: 1243-SEQ ID NO: 1247, SEQ ID NO: 1254-SEQ ID NO: 1257, SEQ ID NO: 1264-SEQ ID NO: 1272, SEQ ID NO: 1275, or SEQ ID NO: 1287-SEQ ID NO: 1289 is replaced with a 3′ box sequence element of any of SEQ ID NO: 40-SEQ ID NO: 42 or SEQ ID NO: 121-SEQ ID NO: 166. In some embodiments, a 3′ box sequence element of any of SEQ ID NO: 40-SEQ ID NO: 42 or SEQ ID NO: 121-SEQ ID NO: 166 is inserted or substituted into a termination sequence of any of SEQ ID NO: 60, SEQ ID NO: 708-SEQ ID NO: 1240, SEQ ID NO: 1242, SEQ ID NO: 1243-SEQ ID NO: 1247, SEQ ID NO: 1254-SEQ ID NO: 1257, SEQ ID NO: 1264-SEQ ID NO: 1272, SEQ ID NO: 1275, or SEQ ID NO: 1287-SEQ ID NO: 1289. In some embodiments, a 3′ box sequence element from is extracted from any of SEQ ID NO: 60, SEQ ID NO: 708-SEQ ID NO: 1240, SEQ ID NO: 1242, SEQ ID NO: 1243-SEQ ID NO: 1247, SEQ ID NO: 1254-SEQ ID NO: 1257, SEQ ID NO: 1264-SEQ ID NO: 1272, SEQ ID NO: 1275, or SEQ ID NO: 1287-SEQ ID NO: 1289 and is inserted into a different termination sequence (e.g., any of SEQ ID NO: 60, SEQ ID NO: 708-SEQ ID NO: 1240, SEQ ID NO: 1242, SEQ ID NO: 1243-SEQ ID NO: 1247, SEQ ID NO: 1254-SEQ ID NO: 1257, SEQ ID NO: 1264-SEQ ID NO: 1272, SEQ ID NO: 1275, or SEQ ID NO: 1287-SEQ ID NO: 1289). In some embodiments, the 3′ box sequence element of a termination sequence of any of SEQ ID NO: 60, SEQ ID NO: 708-SEQ ID NO: 1240, SEQ ID NO: 1242, SEQ ID NO: 1243-SEQ ID NO: 1247, SEQ ID NO: 1254-SEQ ID NO: 1257, SEQ ID NO: 1264-SEQ ID NO: 1272, SEQ ID NO: 1275, or SEQ ID NO: 1287-SEQ ID NO: 1289 is replaced with a 3′ box sequence element extracted from a different termination sequence (e.g., SEQ ID NO: 60, SEQ ID NO: 708-SEQ ID NO: 1240, SEQ ID NO: 1242, SEQ ID NO: 1243-SEQ ID NO: 1247, SEQ ID NO: 1254-SEQ ID NO: 1257, SEQ ID NO: 1264-SEQ ID NO: 1272, SEQ ID NO: 1275, or SEQ ID NO: 1287-SEQ ID NO: 1289) or is replaced with a 3′ box sequence element of any of SEQ ID NO: 40-SEQ ID NO: 42 or SEQ ID NO: 121-SEQ ID NO: 166.

[0172] Termination sequences of the present disclosure may have insertions or deletions of nucleotides on either side of the termination sequence. Nucleotide bases may be inserted or deleted to the 3′ end of termination sequences to extend the length of the cassette. In some embodiments, a termination sequence of the present disclosure (e.g., any of SEQ ID NO: 60, SEQ ID NO: 708-SEQ ID NO: 1240, SEQ ID NO: 1242, SEQ ID NO: 1243-SEQ ID NO: 1247, SEQ ID NO: 1254-SEQ ID NO: 1257, SEQ ID NO: 1264-SEQ ID NO: 1272, SEQ ID NO: 1275, or SEQ ID NO: 1287-SEQ ID NO: 1289) may be truncated by 1 to 2, 1 to 3, 1 to 5, 1 to 10, or 1 to 20 nucleotide bases from the 5′ end, the 3′ end, or both the 5′ end and the 3′ end. In some embodiments, a termination sequence (e.g., any of SEQ ID NO: 60, SEQ ID NO: 708-SEQ ID NO: 1240, SEQ ID NO: 1242, SEQ ID NO: 1243-SEQ ID NO: 1247, SEQ ID NO: 1254-SEQ ID NO: 1257, SEQ ID NO: 1264-SEQ ID NO: 1272, SEQ ID NO: 1275, or SEQ ID NO: 1287-SEQ ID NO: 1289) may be truncated by 1, 2, 3, 4, 5, 6, 7, 8, 9, 10, 11, 12, 13, 14, 15, 16, 17, 18, 19, or 20 nucleotides from the 5′ end, the 3′ end, or both the 5′ end and the 3′ end. In some embodiments, 1 to 2, 1 to 3, 1 to 5, 1 to 10, or 1 to 20 nucleotide bases may be added to the 5′ end, the 3′ end, or both the 5′ end and the 3′ end of a termination sequence (e.g., any of SEQ ID NO: 60, SEQ ID NO: 708-SEQ ID NO: 1240, SEQ ID NO: 1242, SEQ ID NO: 1243-SEQ ID NO: 1247, SEQ ID NO: 1254-SEQ ID NO: 1257, SEQ ID NO: 1264-SEQ ID NO: 1272, SEQ ID NO: 1275, or SEQ ID NO: 1287-SEQ ID NO: 1289). In some embodiments, 1, 2, 3, 4, 5, 6, 7, 8, 9, 10, 11, 12, 13, 14, 15, 16, 17, 18, 19, or 20 nucleotides may be added to the 5′ end, the 3′ end, or both the 5′ end and the 3′ end of a termination sequence (e.g., any of SEQ ID NO: 60, SEQ ID NO: 708-SEQ ID NO: 1240, SEQ ID NO: 1242, SEQ ID NO: 1243-SEQ ID NO: 1247, SEQ ID NO: 1254-SEQ ID NO: 1257, SEQ ID NO: 1264-SEQ ID NO: 1272, SEQ ID NO: 1275, or SEQ ID NO: 1287-SEQ ID NO: 1289). The nucleotides being added to the 5′ end or the 3′ end of the termination sequence may be selected from any nucleotide (e.g., A, T, C, or G). For example, SEQ ID NO: 1254 comprises a 1 nucleotide base deletion on the 5′ end and a 2 nucleotide deletion on the 3′ end of SEQ ID NO: 917. In another example, SEQ ID NO: 1255 comprises a 1 nucleotide base deletion on the 5′ end and a 1 nucleotide base addition to the 3′ end of SEQ ID NO: 709. For example, SEQ ID NO: 1287 comprises a 2 nucleotide base deletion on the 5′ end of SEQ ID NO: 60. For example, SEQ ID NO: 1288 comprises a 4 nucleotide base deletion on the 5′ end of SEQ ID NO: 60. For example, SEQ ID NO: 1289 comprises a 6 nucleotide base deletion on the 5′ end of SEQ ID NO: 60.

[0173] A termination sequence (e.g., any one of SEQ ID NO: 60, SEQ ID NO: 708-SEQ ID NO: 1240, SEQ ID NO: 1242, SEQ ID NO: 1243-SEQ ID NO: 1247, SEQ ID NO: 1254-SEQ ID NO: 1257, SEQ ID NO: 1264-SEQ ID NO: 1272, SEQ ID NO: 1275, or SEQ ID NO: 1287-SEQ ID NO: 1289) may have nucleotide additions on the 3′ end in order to extend the length of the expression cassette. In some embodiments, a termination sequence (e.g., any one of SEQ ID NO: 60, SEQ ID NO: 708-SEQ ID NO: 1240, SEQ ID NO: 1242, SEQ ID NO: 1243-SEQ ID NO: 1247, SEQ ID NO: 1254-SEQ ID NO: 1257, SEQ ID NO: 1264-SEQ ID NO: 1272, SEQ ID NO: 1275, or SEQ ID NO: 1287-SEQ ID NO: 1289) may have additional nucleotides added to the 3′ end in order to extend the termination sequence to a total length of 100 nucleotides, 150 nucleotides, 200 nucleotides, or 300 nucleotides long. For example, SEQ ID NO: 1264 is an extended version of SEQ ID NO: 1002 with an additional 100 nucleotides added to the 3′ end to extend to a total length of 200 nucleotides. In another example, SEQ ID NO: 1265 is an extended version of SEQ ID NO: 1017 with an additional 100 nucleotides added to the 3′ end to extend to a total length of 200 nucleotides.

[0174] Small noncoding RNAs (snRNAs) undergo post-transcriptional cap conversion in which the monomethylguanosine (MMG) cap is converted to a trimethyl guanosine (TMG) cap by the TGSI enzyme. Efficient cap conversion is critical for mature snRNA formation and subsequent transport to the nucleus by snurportin1. A double purine (adenine or guanine) sequence on the 5′ end of a guide RNA may aid in efficient cap conversion. The present disclosure provides for expression cassettes in which the expressed gRNA has an additional 2 bases at the 5′ end, where said additional 2 bases are both purines (adenine or guanine). As such the present disclosure, in some embodiments, provides for expression cassettes having gRNAs that start with an AA, GG, GA, or AG. For example, a SNCA guide RNA (SEQ ID NO: 1290) may have an additional G on the 5′ end resulting in a SNCA guide RNA sequence of SEQ ID NO: 1274 that comprises a GA on the 5′ end.

### Promoter and Termination Sequence Pairings

[0175] Expression cassettes of the current disclosure may comprise a promoter sequence (e.g., any one of SEQ ID NO: 13-SEQ ID NO: 17, SEQ ID NO: 167-SEQ ID NO: 707, SEQ ID NO: 1241, SEQ ID NO: 1248-SEQ ID NO: 1253, or SEQ ID NO: 1259-SEQ ID NO: 1263), a pay load sequence under the transcriptional control of the promoter sequence, and a termination sequence (e.g., any one of SEQ ID NO: 60, SEQ ID NO: 708-SEQ ID NO: 1240, SEQ ID NO: 1242, SEQ ID NO: 1243-SEQ ID NO: 1247, SEQ ID NO: 1254-SEQ ID NO: 1257, SEQ ID NO: 1264-SEQ ID NO: 1272, SEQ ID NO: 1275, or SEQ ID NO: 1287-SEQ ID NO: 1289).

[0176] In some embodiments, the expression cassette comprises a promoter sequence comprising a sequence having at least 80% sequence identity to any one of: a) SEQ ID NO: 17, SEQ ID NO: 1250, or SEQ ID NO: 1262; b) SEQ ID NO: 13 or SEQ ID NO: 15; or c) SEQ ID NO: 1241, SEQ ID NO: 1251, SEQ ID NO: 1252, SEQ ID NO: 1253, or SEQ ID NO: 1263; a payload sequence under transcriptional control of the promoter sequence, the payload sequence comprising a small RNA payload; and a termination sequence comprising a sequence having at least 80% identity to any one of: a) SEQ ID NO: 1002, SEQ ID NO: 1017, SEQ ID NO: 1264, or SEQ ID NO: 1265; or b) SEQ ID NO: 60, SEQ ID NO: 771, SEQ ID NO: 930, SEQ ID NO: 1007, SEQ ID NO: 1021, SEQ ID NO: 1242, SEQ ID NO: 1254, SEQ ID NO: 1255, SEQ ID NO: 1257, or SEQ ID NO: 1269. In some embodiments, the expression cassette comprises a promoter sequence comprising a sequence having at least 80% sequence identity to any one of: a) SEQ ID NO: 17, SEQ ID NO: 1250, or SEQ ID NO: 1262; b) SEQ ID NO: 13 or SEQ ID NO: 15; or c) SEQ ID NO: 1241, SEQ ID NO: 1251, SEQ ID NO: 1252, SEQ ID NO: 1253, or SEQ ID NO: 1263; a payload sequence under transcriptional control of the promoter sequence, the payload sequence comprising a small RNA payload; and a termination sequence. In some embodiments, the expression cassette comprises a promoter sequence; a payload sequence under transcriptional control of the promoter sequence, the payload sequence comprising a small RNA payload; and a termination sequence comprising a sequence having at least 80% identity to any one of: a) SEQ ID NO: 1002, SEQ ID NO: 1017, SEQ ID NO: 1264, or SEQ ID NO: 1265; or b) SEQ ID NO: 60, SEQ ID NO: 771, SEQ ID NO: 930, SEQ ID NO: 1007, SEQ ID NO: 1021, SEQ ID NO: 1242, SEQ ID NO: 1254, SEQ ID NO: 1255, SEQ ID NO: 1257, or SEQ ID NO: 1269.

[0177] In some embodiments, the expression cassette comprises a promoter sequence comprising a sequence having at least 80% sequence identity to any one of SEQ ID NO: 13-SEQ ID NO: 17, SEQ ID NO: 167-SEQ ID NO: 707, SEQ ID NO: 1241, SEQ ID NO: 1248-SEQ ID NO: 1253, or SEQ ID NO: 1259-SEQ ID NO: 1263; a payload sequence under transcriptional control of the promoter sequence, the payload sequence comprising a small RNA payload; and a termination sequence comprising a sequence having at least 80% identity to any one of SEQ ID NO: 60, SEQ ID NO: 708-SEQ ID NO: 1240, SEQ ID NO: 1242, SEQ ID NO: 1243-SEQ ID NO: 1247, SEQ ID NO: 1254-SEQ ID NO: 1257, SEQ ID NO: 1264-SEQ ID NO: 1272, SEQ ID NO: 1275, or SEQ ID NO: 1287-SEQ ID NO: 1289. In some embodiments, the expression cassette comprises a promoter sequence comprising a sequence having at least 80% sequence identity to any one of SEQ ID NO: 13-SEQ ID NO: 17, SEQ ID NO: 167-SEQ ID NO: 707, SEQ ID NO: 1241, SEQ ID NO: 1248-SEQ ID NO: 1253, or SEQ ID NO: 1259-SEQ ID NO: 1263; a payload sequence under transcriptional control of the promoter sequence, the payload sequence comprising a small RNA payload; and a termination sequence. In some embodiments, the expression cassette comprises a promoter sequence; a payload sequence under transcriptional control of the promoter sequence, the payload sequence comprising a small RNA payload; and a termination sequence comprising a sequence having at least 80% identity to any one of SEQ ID NO: 60, SEQ ID NO: 708-SEQ ID NO: 1240, SEQ ID NO: 1242, SEQ ID NO: 1243-SEQ ID NO: 1247, SEQ ID NO: 1254-SEQ ID NO: 1257, SEQ ID NO: 1264-SEQ ID NO: 1272, SEQ ID NO: 1275, or SEQ ID NO: 1287-SEQ ID NO: 1289.

[0178] In an embodiment, the expression cassette comprises:
[0179] (i) a promotor of SEQ ID NO: 17 and a termination sequence of SEQ ID NO: 1264;
[0180] (ii) a promotor of SEQ ID NO: 17 and a termination sequence of SEQ ID NO: 1265;
[0181] (iii) a promotor of SEQ ID NO: 17 and a termination sequence of SEQ ID NO: 1254;
[0182] (iv) a promotor of SEQ ID NO: 17 and a termination sequence of SEQ ID NO: 1255;
[0183] (v) a promotor of SEQ ID NO: 17 and a termination sequence of SEQ ID NO: 1257;
[0184] (vi) a promotor of SEQ ID NO: 17 and a termination sequence of SEQ ID NO: 60;
[0185] (vii) a promotor of SEQ ID NO: 17 and a termination sequence of SEQ ID NO: 1242;
[0186] (viii) a promotor of SEQ ID NO: 1262 and a termination sequence of SEQ ID NO: 1264;
[0187] (ix) a promotor of SEQ ID NO: 1262 and a termination sequence of SEQ ID NO: 1265;
[0188] (x) a promotor of SEQ ID NO: 1262 and a termination sequence of SEQ ID NO: 1254;
[0189] (xi) a promotor of SEQ ID NO: 1262 and a termination sequence of SEQ ID NO: 1255;
[0190] (xii) a promotor of SEQ ID NO: 1262 and a termination sequence of SEQ ID NO: 1257;
[0191] (xiii) a promotor of SEQ ID NO: 1262 and a termination sequence of SEQ ID NO: 60;
[0192] (xiv) a promotor of SEQ ID NO: 1262 and a termination sequence of SEQ ID NO: 1242;
[0193] (xv) a promotor of SEQ ID NO: 1250 and a termination sequence of SEQ ID NO: 1264;
[0194] (xvi) a promotor of SEQ ID NO: 1250 and a termination sequence of SEQ ID NO: 1265;
[0195] (xvii) a promotor of SEQ ID NO: 1250 and a termination sequence of SEQ ID NO: 1254;
[0196] (xviii) a promotor of SEQ ID NO: 1250 and a termination sequence of SEQ ID NO: 1255;
[0197] (xix) a promotor of SEQ ID NO: 1250 and a termination sequence of SEQ ID NO: 1257;
[0198] (xx) a promotor of SEQ ID NO: 1250 and a termination sequence of SEQ ID NO: 60;
[0199] (xxi) a promotor of SEQ ID NO: 1250 and a termination sequence of SEQ ID NO: 1242;
[0200] (xxii) a promotor of SEQ ID NO: 1251 and a termination sequence of SEQ ID NO: 1264;
[0201] (xxiii) a promotor of SEQ ID NO: 1251 and a termination sequence of SEQ ID NO: 1265;
[0202] (xxiv) a promotor of SEQ ID NO: 1251 and a termination sequence of SEQ ID NO: 1254;
[0203] (xxv) a promotor of SEQ ID NO: 1251 and a termination sequence of SEQ ID NO: 1255;
[0204] (xxvi) a promotor of SEQ ID NO: 1251 and a termination sequence of SEQ ID NO: 1257;
[0205] (xxvii) a promotor of SEQ ID NO: 1251 and a termination sequence of SEQ ID NO: 60;
[0206] (xxviii) a promotor of SEQ ID NO: 1251 and a termination sequence of SEQ ID NO: 1242;
[0207] (xxix) a promotor of SEQ ID NO: 1252 and a termination sequence of SEQ ID NO: 1264;
[0208] (xxx) a promotor of SEQ ID NO: 1252 and a termination sequence of SEQ ID NO: 1265;
[0209] (xxxi) a promotor of SEQ ID NO: 1252 and a termination sequence of SEQ ID NO: 1254;
[0210] (xxxii) a promotor of SEQ ID NO: 1252 and a termination sequence of SEQ ID NO: 1255;
[0211] (xxxiii) a promotor of SEQ ID NO: 1252 and a termination sequence of SEQ ID NO: 1257;
[0212] (xxxiv) a promotor of SEQ ID NO: 1252 and a termination sequence of SEQ ID NO: 60;
[0213] (xxxv) a promotor of SEQ ID NO: 1252 and a termination sequence of SEQ ID NO: 1242;
[0214] (xxxvi) a promotor of SEQ ID NO: 1253 and a termination sequence of SEQ ID NO: 1264;
[0215] (xxxvii) a promotor of SEQ ID NO: 1253 and a termination sequence of SEQ ID NO: 1265;
[0216] (xxxviii) a promotor of SEQ ID NO: 1253 and a termination sequence of SEQ ID NO: 1254;
[0217] (xxxix) a promotor of SEQ ID NO: 1253 and a termination sequence of SEQ ID NO: 1255;
[0218] (xl) a promotor of SEQ ID NO: 1253 and a termination sequence of SEQ ID NO: 1257;
[0219] (xli) a promotor of SEQ ID NO: 1253 and a termination sequence of SEQ ID NO: 60;
[0220] (xlii) a promotor of SEQ ID NO: 1253 and a termination sequence of SEQ ID NO: 1242;
[0221] (xliii) a promotor of SEQ ID NO: 17 and a termination sequence of SEQ ID NO: 1269;
[0222] (xliv) a promotor of SEQ ID NO: 1262 and a termination sequence of SEQ ID NO: 1269;
[0223] (xlv) a promotor of SEQ ID NO: 1250 and a termination sequence of SEQ ID NO: 1269;
[0224] (xlvi) a promotor of SEQ ID NO: 1251 and a termination sequence of SEQ ID NO: 1269;
[0225] (xlvii) a promotor of SEQ ID NO: 1252 and a termination sequence of SEQ ID NO: 1269;
[0226] (xlviii) a promotor of SEQ ID NO: 1253 and a termination sequence of SEQ ID NO: 1269;
[0227] (xlix) a promotor of SEQ ID NO: 17 and a termination sequence of SEQ ID NO: 1017;
[0228] (l) a promotor of SEQ ID NO: 1262 and a termination sequence of SEQ ID NO: 1017;
[0229] (li) a promotor of SEQ ID NO: 1250 and a termination sequence of SEQ ID NO: 1017;
[0230] (lii) a promotor of SEQ ID NO: 1251 and a termination sequence of SEQ ID NO: 1017;
[0231] (liii) a promotor of SEQ ID NO: 1252 and a termination sequence of SEQ ID NO: 1017; or
[0232] (liv) a promotor of SEQ ID NO: 1253 and a termination sequence of SEQ ID NO: 1017.

### Further Additional Promotor/Termination Sequence Pairings

[0233] In an embodiment, the expression cassette comprises a promotor of SEQ ID NO: 17 and a termination sequence of SEQ ID NO: 1264. In an embodiment, the expression cassette comprises a promotor of SEQ ID NO: 1262 and a termination sequence of SEQ ID NO: 1265. In an embodiment, the expression cassette comprises a promotor of SEQ ID NO: 1250 and a termination sequence of SEQ ID NO: 1254. In an embodiment, the expression cassette comprises a promotor of SEQ ID NO: 1251 and a termination sequence of SEQ ID NO: 1255. In an embodiment, the expression cassette comprises a promotor of SEQ ID NO: 1252 and a termination sequence of SEQ ID NO: 1255. In an embodiment, the expression cassette comprises a promotor of SEQ ID NO: 1253 and a termination sequence of SEQ ID NO: 1255. In an embodiment, the expression cassette comprises a promotor of SEQ ID NO: 17 and a termination sequence of SEQ ID NO: 60. In an embodiment, the expression cassette comprises a promotor of SEQ ID NO: 17 and a termination sequence of SEQ ID NO: 1242. In an embodiment, the expression cassette comprises a promotor of SEQ ID NO: 1262 and a termination sequence of SEQ ID NO: 1269. In an embodiment, the expression cassette comprises a promotor of SEQ ID NO: 17 and a termination sequence of SEQ ID NO: 1265. In an embodiment, the expression cassette comprises a promotor of SEQ ID NO: 17 and a termination sequence of SEQ ID NO: 1017.

### Payloads

[0234] The expression cassettes of the present disclosure may encode an RNA payload under transcriptional control of a promoter (e.g., an engineered promoter). In some embodiments, the RNA payload may encode a small RNA payload such as a guide sequence (e.g., for RNA or DNA editing), a tracrRNA, an siRNA, an shRNA, or a miRNA, an antisense oligonucleotide (e.g., for expression knockdown), a structural element (e.g., an RNA hairpin), or combinations thereof. Provided herein are engineered RNA payloads and polynucleotides encoding the same; as well as compositions comprising said engineered RNA payloads or said polynucleotides. As used herein, the term “engineered” in reference to an RNA payload or polynucleotide encoding the same refers to a non-naturally occurring RNA or polynucleotide encoding the same. For example, the present disclosure provides for engineered polynucleotides encoding engineered guide RNAs. In some embodiments, the engineered guide comprises RNA. In some embodiments, the engineered guide comprises DNA. In some examples, the engineered guide comprises modified RNA bases or unmodified RNA bases. In some embodiments, the engineered guide comprises modified DNA bases or unmodified DNA bases. In some examples, the engineered guide comprises both DNA and RNA bases.

### Guide RNA Payloads for RNA Editing

[0235] The expression cassettes described herein may be used to enhance expression of engineered guide RNAs and engineered polynucleotides encoding the same for site-specific, selective editing of a target RNA via an RNA editing entity or a biologically active fragment thereof. An engineered guide RNA of the present disclosure can comprise latent structures, such that when the engineered guide RNA is hybridized to the target RNA to form a guide-target RNA scaffold, at least a portion of the latent structure manifests as at least a portion of a structural feature as described herein.

[0236] An engineered guide RNA, as described herein, may comprise a targeting domain with complementarity to a target RNA described herein. As such, a guide RNA can be engineered to site-specifically/selectively target and hybridize to a particular target RNA, thus facilitating editing of specific nucleotide in the target RNA via an RNA editing entity or a biologically active fragment thereof. The targeting domain can include a nucleotide that is positioned such that, when the guide RNA is hybridized to the target RNA, the nucleotide opposes a base to be edited by the RNA editing entity or biologically active fragment thereof and does not base pair, or does not fully base pair, with the base to be edited. This mismatch can help to localize editing of the RNA editing entity to the desired base of the target RNA. However, in some instances there can be some, and in some cases significant, off target editing in addition to the desired edit.

[0237] Hybridization of the target RNA and the targeting domain of the guide RNA may produce specific secondary structures in the guide-target RNA scaffold that manifest upon hybridization, which are referred to herein as “latent structures.” Latent structures, when manifested, may become structural features described herein, including mismatches, bulges, internal loops, and hairpins. Without wishing to be bound by theory, the presence of structural features described herein that are produced upon hybridization of the guide RNA with the target RNA configure the guide RNA to facilitate a specific, or selective, targeted edit of the target RNA via the RNA editing entity or biologically active fragment thereof. Further, the structural features in combination with the mismatch described above generally facilitate an increased amount of editing of a target residue (e.g., an adenosine residue), fewer off target edits, or both, as compared to a construct comprising the mismatch alone or a construct having perfect complementarity to a target RNA. Accordingly, rational design of latent structures in engineered guide RNAs of the present disclosure to produce specific structural features in a guide-target RNA scaffold can be a powerful tool to promote editing of the target RNA with high specificity, selectivity, and robust activity.

[0238] In some examples, the engineered guides provided herein comprise an engineered guide that can be configured, upon hybridization to a target RNA molecule, to form, at least in part, a guide-target RNA scaffold with at least a portion of the target RNA molecule, wherein the guide-target RNA scaffold comprises at least one structural feature, and wherein the guide-target RNA scaffold recruits an RNA editing entity and facilitates a chemical modification of a base of a nucleotide in the target RNA molecule by the RNA editing entity.

[0239] In some examples, a target RNA of an engineered guide RNA of the present disclosure can be a pre-mRNA or mRNA. In some embodiments, the engineered guide RNA of the present disclosure hybridizes to a sequence of the target RNA. In some embodiments, part of the engineered guide RNA (e.g., a targeting domain) hybridizes to the sequence of the target RNA. The part of the engineered guide RNA that hybridizes to the target RNA is of sufficient complementary to the sequence of the target RNA for hybridization to occur.

[0240] Targeting Domain. Engineered guide RNAs disclosed herein can be engineered in any way suitable for RNA editing. In some examples, an engineered guide RNA generally comprises at least a targeting sequence that allows it to hybridize to a region of a target RNA molecule. A targeting sequence can also be referred to as a “targeting domain” or a “targeting region.”

[0241] As used herein, the term “targeting sequence” can be used interchangeable with “targeting domain” or “targeting region” and refers to a polynucleotide sequence within an engineered guide RNA sequence that is at least partially complementary to a target polynucleotide. The target polynucleotide (e.g., a target RNA or a target DNA) may be a region of a polynucleotide of interest, such as a gene or a messenger RNA. As used herein, a “complementary” sequence refers to a sequence that is a reverse complement relative to a second sequence.

[0242] A targeting sequence of an engineered guide RNA allows the engineered guide RNA to hybridize to a target polynucleotide (e.g., a target RNA) through base pairing, such as Watson Crick base pairing. A targeting sequence can be located at either the N-terminus or C-terminus of the engineered guide RNA, or both, or the targeting sequence can be within the engineered guide RNA. The targeting sequence can be of any length sufficient to hybridize with the target polynucleotide. In some cases, the targeting sequence is at least about: 1, 2, 3, 4, 5, 6, 7, 8, 9, 10, 11, 12, 13, 14, 15, 16, 17, 18, 19, 20, 21, 22, 23, 24, 25, 26, 27, 28, 29, 30, 31, 32, 33, 34, 35, 36, 37, 38, 39, 40, 41, 42, 43, 44, 45, 46, 47, 48, 49, 50, 51, 52, 53, 54, 55, 56, 57, 58, 59, 60, 61, 62, 63, 64, 65, 66, 67, 68, 69, 70, 71, 72, 73, 74, 75, 76, 77, 78, 79, 80, 81, 82, 83, 84, 85, 86, 87, 88, 89, 90, 91, 92, 93, 94, 95, 96, 97, 98, 99, 100, 101, 102, 103, 104, 105, 106, 107, 108, 109, 110, 111, 112, 113, 114, 115, 116, 117, 118, 119, 120, 121, 122, 123, 124, 125, 126, 127, 128, 129, 130, 131, 132, 133, 134, 135, 136, 137, 138, 139, 140, 141, 142, 143, 144, 145, 146, 147, 148, 149, 150, 151, 152, 153, 154, 155, 156, 157, 158, 159, 160, 161, 162, 163, 164, 165, 166, 167, 168, 169, 170, 171, 172, 173, 174, 175, 176, 177, 178, 179, 180, 181, 182, 183, 184, 185, 186, 187, 188, 189, 190, 191, 192, 193, 194, 195, 196, 197, 198, 199, or up to about 200 nucleotides in length. In an embodiment, an engineered polynucleotide comprises a targeting sequence that is about 25 to 200, 50 to 150, 75 to 100, 80 to 110, 90 to 120, 95 to 115, 60 to 200, 60 to 180, 60 to 160, 60 to 140, 70 to 200, 70 to 180, 70 to 160, 70 to 140, 80 to 200, 80 to 190, 80 to 170, 80 to 160, 80 to 150, 80 to 140, 80 to 130, 80 to 120, 90 to 200, 90 to 190, 90 to 180, 90 to 170, 90 to 160, 90 to 150, 90 to 140, 90 to 130, 90 to 120, 100 to 200, 100 to 190, 100 to 180, 100 to 170, 100 to 160, 100 to 150, 100 to 140, 100 to 130, 100 to 120, 110 to 200, 110 to 190, 110 to 180, 110 to 170, 110 to 160, 110 to 150, 110 to 140, 110 to 120, 120 to 200, 120 to 190, 120 to 180, 120 to 170, 120 to 160, 120 to 150, 120 to 140, 130 to 200, 130 to 190, 130 to 180, 130 to 170, 130 to 160, 130 to 150, 140 to 200, 140 to 190, 140 to 180, 140 to 170, 140 to 160, 150 to 200, 150 to 190, 150 to 180, 150 to 170, 160 to 200, 160 to 190 or 160 to 180 nucleotides in length.

[0243] A targeting sequence comprises at least partial sequence complementarity to a target polynucleotide. The targeting sequence may have a degree of sequence complementarity to the target polynucleotide sufficient to hybridize with the target polynucleotide. In some cases, the targeting sequence comprises 95%, 96%, 97%, 98%, 99%, or 100% sequence complementarity to the target polynucleotide. In some cases, the targeting sequence comprises less than 100% complementarity to the target polynucleotide sequence. For example, the targeting sequence may have a single base mismatch relative to the target polynucleotide when bound to the target polynucleotide. In other cases, the targeting sequence comprises at least about 1, 2, 3, 4, 5, 6, 7, 8, 9, 10, 11, 12, 13, 14, 15, 16, 20, 30, 40 or up to about 50 base mismatches relative to the target polynucleotide when bound to the target polynucleotide. In some aspects, nucleotide mismatches can be associated with structural features provided herein. In some aspects, a targeting sequence comprises at least about 1, 2, 3, 4, 5, 6, 7, 8, 9, 10, 11, 12, 13, 14, or up to about 15 nucleotides that differ in complementarity from a wildtype polynucleotide of a subject target polynucleotide.

[0244] A targeting sequence comprises nucleotide residues having complementarity to a target polynucleotide. The targeting sequence may have a number of residues with complementarity to the target polynucleotide sufficient to hybridize with the target polynucleotide. The complementary residues may be contiguous or non-contiguous. In some cases, the targeting sequence comprises at least 50 nucleotides having complementarity to the target polynucleotide. In some cases, the targeting sequence comprises from 50 to 150 nucleotides having complementarity to the target polynucleotide. In some cases, the targeting sequence comprises from 50 to 200 nucleotides having complementarity to the target polynucleotide. In some cases, the targeting sequence comprises from 50 to 250 nucleotides having complementarity to the target polynucleotide. In some cases, the targeting sequence comprises from 50 to 300 nucleotides having complementarity to the target polynucleotide. In some cases, the targeting sequence comprises 50, 51, 52, 53, 54, 55, 56, 57, 58, 59, 60, 61, 62, 63, 64, 65, 66, 67, 68, 69, 70, 71, 72, 73, 74, 75, 76, 77, 78, 79, 80, 81, 82, 83, 84, 85, 86, 87, 88, 89, 90, 91, 92, 93, 94, 95, 96, 97, 98, 99, 100, 101, 102, 103, 104, 105, 106, 107, 108, 109, 110, 111, 112, 113, 114, 115, 116, 117, 118, 119, 120, 121, 122, 123, 124, 125, 126, 127, 128, 129, 130, 131, 132, 133, 134, 135, 136, 137, 138, 139, 140, 141, 142, 143, 144, 145, 146, 147, 148, 149, 150, 151, 152, 153, 154, 155, 156, 157, 158, 159, 160, 161, 162, 163, 164, 165, 166, 167, 168, 169, 170, 171, 172, 173, 174, 175, 176, 177, 178, 179, 180, 190, 191, 192, 193, 194, 195, 196, 197, 198, 199, 200, 201, 202, 203, 204, 205, 206, 207, 208, 209, 210, 211, 212, 213, 214, 215, 216, 217, 218, 219, 220, 221, 222, 223, 224, 225, 226, 227, 228, 229, 230, 231, 232, 233, 234, 235, 236, 237, 238, 239, 240, 241, 242, 243, 244, 245, 246, 250, 251, 252, 253, 254, 255, 256, 257, 258, 259, 260, 261, 262, 263, 264, 265, 266, 267, 268, 269, 270, 271, 272, 273, 274, 275, 276, 277, 278, 279, 280, 281, 282, 283, 284, 285, 286, 287, 288, 289, 290, 291, 292, 293, 294, 295, 296, 297, 298, 299, or 300 nucleotides having complementarity to the target polynucleotide. In some cases, the targeting sequence comprises more than 50 nucleotides total and has at least 50 nucleotides having complementarity to the target polynucleotide. In some cases, the targeting sequence comprises from 50 to 400 nucleotides total and has from 50 to 150 nucleotides having complementarity to the target polynucleotide. In some cases, the targeting sequence comprises from 50 to 400 nucleotides total and has from 50 to 200 nucleotides having complementarity to the target polynucleotide. In some cases, the targeting sequence comprises from 50 to 400 nucleotides total and has from 50 to 250 nucleotides having complementarity to the target polynucleotide. In some cases, the targeting sequence comprises from 50 to 400 nucleotides total and has from 50 to 300 nucleotides having complementarity to the target polynucleotide. In some cases, the at least 50 nucleotides having complementarity to the target polynucleotide are separated by one or more mismatches, one or more bulges, or one or more loops, or any combination thereof. In some cases, the from 50 to 150 nucleotides having complementarity to the target polynucleotide are separated by one or more mismatches, one or more bulges, or one or more loops, or any combination thereof. In some cases, the from 50 to 200 nucleotides having complementarity to the target polynucleotide are separated by one or more mismatches, one or more bulges, or one or more loops, or any combination thereof. In some cases, the from 50 to 250 nucleotides having complementarity to the target polynucleotide are separated by one or more mismatches, one or more bulges, or one or more loops, or any combination thereof. In some cases, the from 50 to 300 nucleotides having complementarity to the target polynucleotide are separated by one or more mismatches, one or more bulges, or one or more loops, or any combination thereof. For example, a targeting sequence comprises a total of 54 nucleotides wherein, sequentially, 25 nucleotides are complementarity to the target polynucleotide, 4 nucleotides form a bulge, and 25 nucleotides are complementarity to the target polynucleotide. As another example, a targeting sequence comprises a total of 118 nucleotides wherein, sequentially, 25 nucleotides are complementarity to the target polynucleotide, 4 nucleotides form a bulge, 25 nucleotides are complementarity to the target polynucleotide, 14 nucleotides form a loop, and 50 nucleotides are complementary to the target polynucleotide.

[0245] In some cases, a targeting domain comprises 95%, 96%, 97%, 98%, 99%, or 100% sequence complementarity to a target RNA. In some cases, a targeting sequence comprises less than 100% complementarity to a target RNA sequence. For example, a targeting sequence and a region of a target RNA that can be bound by the targeting sequence can have a single base mismatch.

[0246] The targeting sequence can have sufficient complementarity to a target RNA to allow for hybridization of the targeting sequence to the target RNA. In some embodiments, the targeting sequence has a minimum antisense complementarity of about 50 nucleotides or more to the target RNA. In some embodiments, the targeting sequence has a minimum antisense complementarity of about 60 nucleotides or more to the target RNA. In some embodiments, the targeting sequence has a minimum antisense complementarity of about 70 nucleotides or more to the target RNA. In some embodiments, the targeting sequence has a minimum antisense complementarity of about 80 nucleotides or more to the target RNA. In some embodiments, the targeting sequence has a minimum antisense complementarity of about 90 nucleotides or more to the target RNA. In some embodiments, the targeting sequence has a minimum antisense complementarity of about 100 nucleotides or more to the target RNA. In some embodiments, antisense complementarity refers to non-contiguous stretches of sequence. In some embodiments, antisense complementarity refers to contiguous stretches of sequence.

[0247] In some embodiments, hybridization of the targeting sequence to the target RNA to form a guide-target RNA scaffold may manifest a latent structural feature. For example, a latent structural feature may comprise a symmetric bulge, an asymmetric bulge, a symmetric internal loop, an asymmetric internal loop, or combinations thereof. In some embodiments, the latent structural feature may comprise 1, 2, 3, 4, 5, 6, 7, 8, 9, 10, 11, 12, 13, 14, 15, 16, 17, 18, 19, or 20 unpaired nucleotides on the target RNA side. In some embodiments, the latent structural feature may comprise 1, 2, 3, 4, 5, 6, 7, 8, 9, 10, 11, 12, 13, 14, 15, 16, 17, 18, 19, or 20 unpaired nucleotides on the guide RNA side.

[0248] In some embodiments an engineered guide RNA for RNA editing may have at least about 70%, at least about 75%, at least about 80%, at least about 83%, at least about 85%, at least about 87%, at least about 90%, at least about 91%, at least about 92%, at least about 93%, at least about 94%, at least about 95%, at least about 96% at least about 97%, at least about 98%, at least about 99%, or about 100% sequence identity to SEQ ID NO: 1273, SEQ ID NO: 1274, SEQ ID NO: 61, or SEQ ID NO: 1290. For example, an engineered guide RNA of SEQ ID NO: 1273 may be used to target PMP22. In another example, an engineered guide RNA of SEQ ID NO: 1274 may be used to target SNCA. In another example, an engineered guide RNA of SEQ ID NO: 1290 may be used to target SNCA. In another example, an engineered guide RNA of SEQ ID NO: 61 may be used to target SERPINA1. Examples of engineered guide RNAs are provided in TABLE 8.

TABLE 8
Engineered Guide RNAs

| | SEQ ID | |
|---|---|---|
| Target | NO: | Sequence |
| PMP22 | SEQ ID | GACCGCACCAGCACCGCGACGTGGAGGACGATG |
| | NO: | ATACTCAGCAACAGGAGGAGCCCACTGGCGGCA |
| | 1273 | AGTTCTGCTCAGCGGAGTTTCTGCCCGGCCAAA |
| | | CAGCGTGTGGAATTTTTGGAGCAGGTTTTCTGA |
| | | CTTCGGTCGGAAAACCCCT |
| SNCA | SEQ ID | GACCGGCCACAACTCCCTCCTTGGCCTTTGAAA |
| | NO: | GTCCTTTCATGAATACATCCACGGCTAATGAAT |
| | 1274 | TCCTTTACACCACACTGGAAAACATAAAATACA |
| | | CTTTGAGTGGAATTTTTGGAGCAGGTTTTCTGA |
| | | CTTCGGTCGGAAAACCCCT |
| SNCA | SEQ ID | ACCGGCCACAACTCCCTCCTTGGCCTTTGAAAG |
| | NO: | TCCTTTCATGAATACATCCACGGCTAATGAATT |
| | 1290 | CCTTTACACCACACTGGAAAACATAAAATACAC |
| | | TTTGAGTGGAATTTTTGGAGCAGGTTTTCTGAC |
| | | TTCGGTCGGAAAACCCCT |
| SERPINA1 | SEQ ID | GACCGTAGACATGGGTATGGCCTCTAATTTGTA |
| | NO: 61 | GGCCCCAGCAGCTTCAGTCCCTTACTCGTCGTA |
| | | CCAGAGCACAGCCAGTCGTATGCACGGCGTGGA |
| | | ATTTTTGGAGCAGGTTTTCTGACTTCGGTCGGA |
| | | AAACCCCT |

[0249] Engineered Guide RNAs Having a Recruitment Domain. In some examples, a subject engineered guide RNA comprises a recruiting domain that recruits an RNA editing entity (e.g., ADAR), where in some instances, the recruiting domain is formed and present in the absence of binding to the target RNA. A “recruiting domain” can be referred to herein as a “recruiting sequence” or a “recruiting region”. In some examples, a subject engineered guide can facilitate editing of a base of a nucleotide of in a target sequence of a target RNA that results in modulating the expression of a polypeptide encoded by the target RNA. In some instances, modulation can be increased or decrease expression of the polypeptide. In some cases, an engineered guide can be configured to facilitate an editing of a base of a nucleotide or polynucleotide of a region of an RNA by an RNA editing entity (e.g., ADAR or APOBEC). In order to facilitate editing, an engineered polynucleotide of the disclosure can recruit an RNA editing entity (e.g., ADAR or APOBEC). Various RNA editing entity recruiting domains can be utilized. In some examples, a recruiting domain comprises: Glutamate ionotropic receptor AMPA type subunit 2 (GluR2), an Alu sequence, or, in the case of recruiting APOBEC, an APOBEC recruiting domain.

[0250] In some examples, more than one recruiting domain can be included in an engineered guide of the disclosure. In examples where a recruiting domain can be present, the recruiting domain can be utilized to position the RNA editing entity to effectively react with a subject target RNA after the targeting sequence hybridizes to a target sequence of a target RNA. In some cases, a recruiting domain can allow for transient binding of the RNA editing entity to the engineered guide. In some examples, the recruiting domain allows for permanent binding of the RNA editing entity to the engineered guide. A recruiting domain can be of any length. In some cases, a recruiting domain can be from about 1, 2, 3, 4, 5, 6, 7, 8, 9, 10, 11, 12, 13, 14, 15, 16, 17, 18, 19, 20, 21, 22, 23, 24, 25, 26, 27, 28, 29, 30, 31, 32, 33, 34, 35, 36, 37, 38, 39, 40, 41, 42, 43, 44, 45, 46, 47, 48, 49, 50, 51, 52, 53, 54, 55, 56, 57, 58, 59, 60, 61, 62, 63, 64, 65, 66, 67, 68, 69, 70, 71, 72, 73, 74, 75, up to about 80 nucleotides in length. In some cases, a recruiting domain can be no more than about 1, 2, 3, 4, 5, 6, 7, 8, 9, 10, 11, 12, 13, 14, 15, 16, 17, 18, 19, 20, 21, 22, 23, 24, 25, 26, 27, 28, 29, 30, 31, 32, 33, 34, 35, 36, 37, 38, 39, 40, 41, 42, 43, 44, 45, 46, 47, 48, 49, 50, 51, 52, 53, 54, 55, 56, 57, 58, 59, 60, 61, 62, 63, 64, 65, 66, 67, 68, 69, 70, 71, 72, 73, 74, 75, or 80 nucleotides in length. In some cases, a recruiting domain can be about 45 nucleotides in length. In some cases, at least a portion of a recruiting domain comprises at least 1 to about 75 nucleotides. In some cases, at least a portion of a recruiting domain comprises about 45 nucleotides to about 60 nucleotides.

[0251] In some embodiments, a recruiting domain comprises a GluR2 sequence or functional fragment thereof. In some cases, a GluR2 sequence can be recognized by an RNA editing entity, such as an ADAR or biologically active fragment thereof. In some embodiments, a GluR2 sequence can be a non-naturally occurring sequence. In some cases, a GluR2 sequence can be modified, for example for enhanced recruitment. In some embodiments, a GluR2 sequence can comprise a portion of a naturally occurring GluR2 sequence and a synthetic sequence.

[0252] In some examples, a recruiting domain comprises a GluR2 sequence, or a sequence having at least about 70%, 80%, 85%, 90%, 95%, 98%, 99%, or 100% identity and/or length to: GUGGAAUAGUAUAACAAUAUGCUAAAUGUUGUUAUAGUAUCCCAC (SEQ ID NO: 51). In some cases, a recruiting domain can comprise at least about 80% sequence homology to at least about 10, 15, 20, 25, or 30 nucleotides of SEQ ID NO: 51. In some examples, a recruiting domain can comprise at least about 90%, 95%, 96%, 97%, 98%, or 99% sequence homology and/or length to SEQ ID NO: 51.

[0253] Additional, RNA editing entity recruiting domains are also contemplated. In an embodiment, a recruiting domain comprises an apolipoprotein B mRNA editing enzyme, catalytic polypeptide-like (APOBEC) domain. In some cases, an APOBEC domain can comprise a non-naturally occurring sequence or naturally occurring sequence. In some embodiments, an APOBEC-domain-encoding sequence can comprise a modified portion. In some cases, an APOBEC-domain-encoding sequence can comprise a portion of a naturally occurring APOBEC-domain-encoding-sequence. In another embodiment, a recruiting domain can be from an Alu domain.

[0254] Any number of recruiting domains can be found in an engineered guide of the present disclosure. In some examples, at least about 1, 2, 3, 4, 5, 6, 7, 8, 9, or up to about 10 recruiting domains can be included in an engineered guide. Recruiting domains can be located at any position of engineered guide RNAs. In some cases, a recruiting domain can be on an N-terminus, middle, or C-terminus of an engineered guide RNA. A recruiting domain can be upstream or downstream of a targeting sequence. In some cases, a recruiting domain flanks a targeting sequence of a subject guide. A recruiting sequence can comprise all ribonucleotides or deoxyribonucleotides, although a recruiting domain comprising both ribo- and deoxyribonucleotides can in some cases not be excluded.

[0255] Engineered Guide RNAs with Latent Structure. In some examples, an engineered guide disclosed herein useful for facilitating editing of a target RNA by an RNA editing entity can be an engineered latent guide RNA. An “engineered latent guide RNA” refers to an engineered guide RNA that comprises latent structure. “Latent structure” refers to a structural feature that substantially forms only upon hybridization of a guide RNA to a target RNA. For example, the sequence of a guide RNA provides one or more structural features, but these structural features substantially form only upon hybridization to the target RNA, and thus the one or more latent structural features manifest as structural features upon hybridization to the target RNA. Upon hybridization of the guide RNA to the target RNA, the structural feature is formed, and the latent structure provided in the guide RNA is, thus, unmasked. The formation and structure of a latent structural feature upon binding to the target RNA depends on the guide RNA sequence. For example, formation and structure of the latent structural feature may depend on a pattern of complementary and mismatched residues in the guide RNA sequence relative to the target RNA. The guide RNA sequence may be engineered to have a latent structural feature that forms upon binding to the target RNA.

[0256] A double stranded RNA (dsRNA) substrate may be formed upon hybridization of an engineered guide RNA of the present disclosure to a target RNA. The resulting dsRNA substrate is also referred to herein as a “guide-target RNA scaffold.”

[0257] FIG. 16 shows a legend of various exemplary structural features present in guide-target RNA scaffolds formed upon hybridization of a latent guide RNA of the present disclosure to a target RNA. Example structural features shown include an 8/7 asymmetric loop (i., 8 nucleotides on the target RNA side and 7 nucleotides on the guide RNA side), a 2/2 symmetric bulge (ii., 2 nucleotides on the target RNA side and 2 nucleotides on the guide RNA side), a 1/1 mismatch (iii., 1 nucleotide on the target RNA side and 1 nucleotide on the guide RNA side), a 5/5 symmetric internal loop (iv., 5 nucleotides on the target RNA side and 5 nucleotides on the guide RNA side), a 24 bp region (v., 24 nucleotides on the target RNA side base paired to 24 nucleotides on the guide RNA side), and a 2/3 asymmetric bulge (vi., 2 nucleotides on the target RNA side and 3 nucleotides on the guide RNA side).

[0258] Unless otherwise noted, the number of participating nucleotides in a given structural feature is indicated as the nucleotides on the target RNA side over nucleotides on the guide RNA side. Also shown in this legend is a key to the positional annotation of each figure. For example, the target nucleotide to be edited is designated as the 0 position. Downstream (3′) of the target nucleotide to be edited, each nucleotide is counted in increments of +1. Upstream (5′) of the target nucleotide to be edited, each nucleotide is counted in increments of −1. Thus, the example 2/2 symmetric bulge in this legend is at the +12 to +13 position in the guide-target RNA scaffold. Similarly, the 2/3 asymmetric bulge in this legend is at the −36 to −37 position in the guide-target RNA scaffold. As used herein, positional annotation is provided with respect to the target nucleotide to be edited and on the target RNA side of the guide-target RNA scaffold. As used herein, if a single position is annotated, the structural feature extends from that position away from position 0 (target nucleotide to be edited). For example, if a latent guide RNA is annotated herein as forming a 2/3 asymmetric bulge at position −36, then the 2/3 asymmetric bulge forms from −36 position to the −37 position with respect to the target nucleotide to be edited (position 0) on the target RNA side of the guide-target RNA scaffold. As another example, if a latent guide RNA is annotated herein as forming a 2/2 symmetric bulge at position +12, then the 2/2 symmetric bulge forms from the +12 to the +13 position with respect to the target nucleotide to be edited (position 0) on the target RNA side of the guide-target RNA scaffold.

[0259] In some examples, the engineered guides disclosed herein lack a recruiting region and recruitment of the RNA editing entity can be effectuated by structural features of the guide-target RNA scaffold formed by hybridization of the engineered guide RNA and the target RNA. In some examples, the engineered guide, when present in an aqueous solution and not bound to the target RNA molecule, does not comprise structural features that recruit the RNA editing entity (e.g., ADAR or APOBEC). The engineered guide RNA, upon hybridization to a target RNA, form with the target RNA molecule, one or more structural features that recruits an RNA editing entity (e.g., ADAR or APOBEC).

[0260] In cases where a recruiting sequence can be absent, an engineered guide RNA can be still capable of associating with a subject RNA editing entity (e.g., ADAR or APOBEC) to facilitate editing of a target RNA and/or modulate expression of a polypeptide encoded by a subject target RNA. This can be achieved through structural features formed in the guide-target RNA scaffold formed upon hybridization of the engineered guide RNA and the target RNA. Structural features can comprise any one of a: mismatch, symmetrical bulge, asymmetrical bulge, symmetrical internal loop, asymmetrical internal loop, hairpins, wobble base pairs, or any combination thereof.

[0261] Described herein are structural features which can be present in a guide-target RNA scaffold of the present disclosure. Examples of features include a mismatch, a bulge (symmetrical bulge or asymmetrical bulge), an internal loop (symmetrical internal loop or asymmetrical internal loop), or a hairpin (a recruiting hairpin or a non-recruiting hairpin). Engineered guide RNAs of the present disclosure can have from 1 to 50 features. Engineered guide RNAs of the present disclosure can have from 1 to 5, from 5 to 10, from 10 to 15, from 15 to 20, from 20 to 25, from 25 to 30, from 30 to 35, from 35 to 40, from 40 to 45, from 45 to 50, from 5 to 20, from 1 to 3, from 4 to 5, from 2 to 10, from 20 to 40, from 10 to 40, from 20 to 50, from 30 to 50, from 4 to 7, or from 8 to 10 features. In some embodiments, structural features (e.g., mismatches, bulges, internal loops) can be formed from latent structure in an engineered latent guide RNA upon hybridization of the engineered latent guide RNA to a target RNA and, thus, formation of a guide-target RNA scaffold. In some embodiments, structural features are not formed from latent structures and are, instead, pre-formed structures (e.g., a GluR2 recruitment hairpin or a hairpin from U7 snRNA).

[0262] A guide-target RNA scaffold may be formed upon hybridization of an engineered guide RNA of the present disclosure to a target RNA. As disclosed herein, a mismatch refers to a single nucleotide in a guide RNA that is unpaired to an opposing single nucleotide in a target RNA within the guide-target RNA scaffold. A mismatch can comprise any two single nucleotides that do not base pair. Where the number of participating nucleotides on the guide RNA side and the target RNA side exceeds 1, the resulting structure is no longer considered a mismatch, but rather, is considered a bulge or an internal loop, depending on the size of the structural feature. In some embodiments, a mismatch is an A/C mismatch. An A/C mismatch can comprise a C in an engineered guide RNA of the present disclosure opposite an A in a target RNA. An A/C mismatch can comprise an A in an engineered guide RNA of the present disclosure opposite a C in a target RNA. A G/G mismatch can comprise a G in an engineered guide RNA of the present disclosure opposite a G in a target RNA.

[0263] In some embodiments, a mismatch positioned 5′ of the edit site can facilitate base-flipping of the target A to be edited. A mismatch can also help confer sequence specificity. Thus, a mismatch can be a structural feature formed from latent structure provided by an engineered latent guide RNA.

[0264] In another aspect, a structural feature comprises a wobble base. A wobble base pair refers to two bases that weakly base pair. For example, a wobble base pair of the present disclosure can refer to a G paired with a U. Thus, a wobble base pair can be a structural feature formed from latent structure provided by an engineered latent guide RNA.

[0265] In some cases, a structural feature can be a hairpin. As disclosed herein, a hairpin includes an RNA duplex wherein a portion of a single RNA strand has folded in upon itself to form the RNA duplex. The portion of the single RNA strand folds upon itself due to having nucleotide sequences that base pair to each other, where the nucleotide sequences are separated by an intervening sequence that does not base pair with itself, thus forming a base-paired portion and non-base paired, intervening loop portion. A hairpin can have from 10 to 500 nucleotides in length of the entire duplex structure. The loop portion of a hairpin can be from 3 to 15 nucleotides long. A hairpin can be present in any of the engineered guide RNAs disclosed herein. The engineered guide RNAs disclosed herein can have from 1 to 10 hairpins. In some embodiments, the engineered guide RNAs disclosed herein have 1 hairpin. In some embodiments, the engineered guide RNAs disclosed herein have 2 hairpins. As disclosed herein, a hairpin can include a recruitment hairpin or a non-recruitment hairpin. A hairpin can be located anywhere within the engineered guide RNAs of the present disclosure. In some embodiments, one or more hairpins is proximal to or present at the 3′ end of an engineered guide RNA of the present disclosure, proximal to or at the 5′ end of an engineered guide RNA of the present disclosure, proximal to or within the targeting domain of the engineered guide RNAs of the present disclosure, or any combination thereof.

[0266] In some aspects, a structural feature comprises a non-recruitment hairpin. A non-recruitment hairpin, as disclosed herein, does not have a primary function of recruiting an RNA editing entity. A non-recruitment hairpin, in some instances, does not recruit an RNA editing entity. In some instances, a non-recruitment hairpin has a dissociation constant for binding to an RNA editing entity under physiological conditions that is insufficient for binding. For example, a non-recruitment hairpin has a dissociation constant for binding an RNA editing entity at 25° C. that is greater than about 1 mM, 10 mM, 100 mM, or 1 M, as determined in an in vitro assay. A non-recruitment hairpin can exhibit functionality that improves localization of the engineered guide RNA to the target RNA. In some embodiments, the non-recruitment hairpin improves nuclear retention. In some embodiments, the non-recruitment hairpin comprises a hairpin from U7 snRNA. Thus, a non-recruitment hairpin such as a hairpin from U7 snRNA is a pre-formed structural feature that can be present in constructs comprising engineered guide RNA constructs, not a structural feature formed by latent structure provided in an engineered latent guide RNA.

[0267] A hairpin of the present disclosure can be of any length. In an aspect, a hairpin can be from about 10-500 or more nucleotides. In some cases, a hairpin can comprise about 10, 11, 12, 13, 14, 15, 16, 17, 18, 19, 20, 21, 22, 23, 24, 25, 26, 27, 28, 29, 30, 31, 32, 33, 34, 35, 36, 37, 38, 39, 40, 41, 42, 43, 44, 45, 46, 47, 48, 49, 50, 51, 52, 53, 54, 55, 56, 57, 58, 59, 60, 61, 62, 63, 64, 65, 66, 67, 68, 69, 70, 71, 72, 73, 74, 75, 76, 77, 78, 79, 80, 81, 82, 83, 84, 85, 86, 87, 88, 89, 90, 91, 92, 93, 94, 95, 96, 97, 98, 99, 100, 101, 102, 103, 104, 105, 106, 107, 108, 109, 110, 111, 112, 113, 114, 115, 116, 117, 118, 119, 120, 121, 122, 123, 124, 125, 126, 127, 128, 129, 130, 131, 132, 133, 134, 135, 136, 137, 138, 139, 140, 141, 142, 143, 144, 145, 146, 147, 148, 149, 150, 151, 152, 153, 154, 155, 156, 157, 158, 159, 160, 161, 162, 163, 164, 165, 166, 167, 168, 169, 170, 171, 172, 173, 174, 175, 176, 177, 178, 179, 180, 181, 182, 183, 184, 185, 186, 187, 188, 189, 190, 191, 192, 193, 194, 195, 196, 197, 198, 199, 200, 201, 202, 203, 204, 205, 206, 207, 208, 209, 210, 211, 212, 213, 214, 215, 216, 217, 218, 219, 220, 221, 222, 223, 224, 225, 226, 227, 228, 229, 230, 231, 232, 233, 234, 235, 236, 237, 238, 239, 240, 241, 242, 243, 244, 245, 246, 247, 248, 249, 250, 251, 252, 253, 254, 255, 256, 257, 258, 259, 260, 261, 262, 263, 264, 265, 266, 267, 268, 269, 270, 271, 272, 273, 274, 275, 276, 277, 278, 279, 280, 281, 282, 283, 284, 285, 286, 287, 288, 289, 290, 291, 292, 293, 294, 295, 296, 297, 298, 299, 300, 301, 302, 303, 304, 305, 306, 307, 308, 309, 310, 311, 312, 313, 314, 315, 316, 317, 318, 319, 320, 321, 322, 323, 324, 325, 326, 327, 328, 329, 330, 331, 332, 333, 334, 335, 336, 337, 338, 339, 340, 341, 342, 343, 344, 345, 346, 347, 348, 349, 350, 351, 352, 353, 354, 355, 356, 357, 358, 359, 360, 361, 362, 363, 364, 365, 366, 367, 368, 369, 370, 371, 372, 373, 374, 375, 376, 377, 378, 379, 380, 381, 382, 383, 384, 385, 386, 387, 388, 389, 390, 391, 392, 393, 394, 395, 396, 397, 398, 399, 400, 401, 402, 403, 404, 405, 406, 407, 408, 409, 410, 411, 412, 413, 414, 415, 416, 417, 418, 419, 420, 421, 422, 423, 424, 425, 426, 427, 428, 429, 430, 431, 432, 433, 434, 435, 436, 437, 438, 439, 440, 441, 442, 443, 444, 445, 446, 447, 448, 449, 450, 451, 452, 453, 454, 455, 456, 457, 458, 459, 460, 461, 462, 463, 464, 465, 466, 467, 468, 469, 470, 471, 472, 473, 474, 475, 476, 477, 478, 479, 480, 481, 482, 483, 484, 485, 486, 487, 488, 489, 490, 491, 492, 493, 494, 495, 496, 497, 498, 499, 500 or more nucleotides. In other cases, a hairpin can also comprise 10 to 20, 10 to 30, 10 to 40, 10 to 50, 10 to 60, 10 to 70, 10 to 80, 10 to 90, 10 to 100, 10 to 110, 10 to 120, 10 to 130, 10 to 140, 10 to 150, 10 to 160, 10 to 170, 10 to 180, 10 to 190, 10 to 200, 10 to 210, 10 to 220, 10 to 230, 10 to 240, 10 to 250, 10 to 260, 10 to 270, 10 to 280, 10 to 290, 10 to 300, 10 to 310, 10 to 320, 10 to 330, 10 to 340, 10 to 350, 10 to 360, 10 to 370, 10 to 380, 10 to 390, 10 to 400, 10 to 410, 10 to 420, 10 to 430, 10 to 440, 10 to 450, 10 to 460, 10 to 470, 10 to 480, 10 to 490, or 10 to 500 nucleotides.

[0268] A guide-target RNA scaffold is formed upon hybridization of an engineered guide RNA of the present disclosure to a target RNA. As disclosed herein, a bulge refers to the structure substantially formed only upon formation of the guide-target RNA scaffold, where contiguous nucleotides in either the engineered guide RNA or the target RNA are not complementary to their positional counterparts on the opposite strand. A bulge can change the secondary or tertiary structure of the guide-target RNA scaffold. A bulge can independently have from 0 to 4 contiguous nucleotides on the guide RNA side of the guide-target RNA scaffold and 1 to 4 contiguous nucleotides on the target RNA side of the guide-target RNA scaffold or a bulge can independently have from 0 to 4 nucleotides on the target RNA side of the guide-target RNA scaffold and 1 to 4 contiguous nucleotides on the guide RNA side of the guide-target RNA scaffold. However, a bulge, as used herein, does not refer to a structure where a single participating nucleotide of the engineered guide RNA and a single participating nucleotide of the target RNA do not base pair—a single participating nucleotide of the engineered guide RNA and a single participating nucleotide of the target RNA that do not base pair is referred to herein as a mismatch. Further, where the number of participating nucleotides on either the guide RNA side or the target RNA side exceeds 4, the resulting structure is no longer considered a bulge, but rather, is considered an internal loop. In some embodiments, the guide-target RNA scaffold of the present disclosure has 2 bulges. In some embodiments, the guide-target RNA scaffold of the present disclosure has 3 bulges. In some embodiments, the guide-target RNA scaffold of the present disclosure has 4 bulges. Thus, a bulge can be a structural feature formed from latent structure provided by an engineered latent guide RNA.

[0269] In some embodiments, the presence of a bulge in a guide-target RNA scaffold can position or can help to position ADAR to selectively edit the target A in the target RNA and reduce off-target editing of non-target A(s) in the target RNA. In some embodiments, the presence of a bulge in a guide-target RNA scaffold can recruit or help recruit additional amounts of ADAR. Bulges in guide-target RNA scaffolds disclosed herein can recruit other proteins, such as other RNA editing entities. In some embodiments, a bulge positioned 5′ of the edit site can facilitate base-flipping of the target A to be edited. A bulge can also help confer sequence specificity for the A of the target RNA to be edited, relative to other A(s) present in the target RNA. For example, a bulge can help direct ADAR editing by constraining it in an orientation that yields selective editing of the target A.

[0270] A guide-target RNA scaffold is formed upon hybridization of an engineered guide RNA of the present disclosure to a target RNA. A bulge can be a symmetrical bulge or an asymmetrical bulge. A symmetrical bulge is formed when the same number of nucleotides is present on each side of the bulge. For example, a symmetrical bulge in a guide-target RNA scaffold of the present disclosure can have the same number of nucleotides on the engineered guide RNA side and the target RNA side of the guide-target RNA scaffold. A symmetrical bulge of the present disclosure can be formed by 2 nucleotides on the engineered guide RNA side of the guide-target RNA scaffold target and 2 nucleotides on the target RNA side of the guide-target RNA scaffold. A symmetrical bulge of the present disclosure can be formed by 3 nucleotides on the engineered guide RNA side of the guide-target RNA scaffold target and 3 nucleotides on the target RNA side of the guide-target RNA scaffold. A symmetrical bulge of the present disclosure can be formed by 4 nucleotides on the engineered guide RNA side of the guide-target RNA scaffold target and 4 nucleotides on the target RNA side of the guide-target RNA scaffold. Thus, a symmetrical bulge can be a structural feature formed from latent structure provided by an engineered latent guide RNA.

[0271] A guide-target RNA scaffold is formed upon hybridization of an engineered guide RNA of the present disclosure to a target RNA. A bulge can be a symmetrical bulge or an asymmetrical bulge. An asymmetrical bulge is formed when a different number of nucleotides is present on each side of the bulge. For example, an asymmetrical bulge in a guide-target RNA scaffold of the present disclosure can have different numbers of nucleotides on the engineered guide RNA side and the target RNA side of the guide-target RNA scaffold. An asymmetrical bulge of the present disclosure can be formed by 0 nucleotides on the engineered guide RNA side of the guide-target RNA scaffold and 1 nucleotide on the target RNA side of the guide-target RNA scaffold. An asymmetrical bulge of the present disclosure can be formed by 0 nucleotides on the target RNA side of the guide-target RNA scaffold and 1 nucleotide on the engineered guide RNA side of the guide-target RNA scaffold. An asymmetrical bulge of the present disclosure can be formed by 0 nucleotides on the engineered guide RNA side of the guide-target RNA scaffold and 2 nucleotides on the target RNA side of the guide-target RNA scaffold. An asymmetrical bulge of the present disclosure can be formed by 0 nucleotides on the target RNA side of the guide-target RNA scaffold and 2 nucleotides on the engineered guide RNA side of the guide-target RNA scaffold. An asymmetrical bulge of the present disclosure can be formed by 0 nucleotides on the engineered guide RNA side of the guide-target RNA scaffold and 3 nucleotides on the target RNA side of the guide-target RNA scaffold. An asymmetrical bulge of the present disclosure can be formed by 0 nucleotides on the target RNA side of the guide-target RNA scaffold and 3 nucleotides on the engineered guide RNA side of the guide-target RNA scaffold. An asymmetrical bulge of the present disclosure can be formed by 0 nucleotides on the engineered guide RNA side of the guide-target RNA scaffold and 4 nucleotides on the target RNA side of the guide-target RNA scaffold. An asymmetrical bulge of the present disclosure can be formed by 0 nucleotides on the target RNA side of the guide-target RNA scaffold and 4 nucleotides on the engineered guide RNA side of the guide-target RNA scaffold. An asymmetrical bulge of the present disclosure can be formed by 1 nucleotide on the engineered guide RNA side of the guide-target RNA scaffold and 2 nucleotides on the target RNA side of the guide-target RNA scaffold. An asymmetrical bulge of the present disclosure can be formed by 1 nucleotide on the target RNA side of the guide-target RNA scaffold and 2 nucleotides on the engineered guide RNA side of the guide-target RNA scaffold. An asymmetrical bulge of the present disclosure can be formed by 1 nucleotide on the engineered guide RNA side of the guide-target RNA scaffold and 3 nucleotides on the target RNA side of the guide-target RNA scaffold. An asymmetrical bulge of the present disclosure can be formed by 1 nucleotide on the target RNA side of the guide-target RNA scaffold and 3 nucleotides on the engineered guide RNA side of the guide-target RNA scaffold. An asymmetrical bulge of the present disclosure can be formed by 1 nucleotide on the engineered guide RNA side of the guide-target RNA scaffold and 4 nucleotides on the target RNA side of the guide-target RNA scaffold. An asymmetrical bulge of the present disclosure can be formed by 1 nucleotide on the target RNA side of the guide-target RNA scaffold and 4 nucleotides on the engineered guide RNA side of the guide-target RNA scaffold. An asymmetrical bulge of the present disclosure can be formed by 2 nucleotides on the engineered guide RNA side of the guide-target RNA scaffold and 3 nucleotides on the target RNA side of the guide-target RNA scaffold. An asymmetrical bulge of the present disclosure can be formed by 2 nucleotides on the target RNA side of the guide-target RNA scaffold and 3 nucleotides on the engineered guide RNA side of the guide-target RNA scaffold. An asymmetrical bulge of the present disclosure can be formed by 2 nucleotides on the engineered guide RNA side of the guide-target RNA scaffold and 4 nucleotides on the target RNA side of the guide-target RNA scaffold. An asymmetrical bulge of the present disclosure can be formed by 2 nucleotides on the target RNA side of the guide-target RNA scaffold and 4 nucleotides on the engineered guide RNA side of the guide-target RNA scaffold. An asymmetrical bulge of the present disclosure can be formed by 3 nucleotides on the engineered guide RNA side of the guide-target RNA scaffold and 4 nucleotides on the target RNA side of the guide-target RNA scaffold. An asymmetrical bulge of the present disclosure can be formed by 3 nucleotides on the target RNA side of the guide-target RNA scaffold and 4 nucleotides on the engineered guide RNA side of the guide-target RNA scaffold. Thus, an asymmetrical bulge can be a structural feature formed from latent structure provided by an engineered latent guide RNA.

[0272] In some cases, a structural feature can be an internal loop. As disclosed herein, an internal loop refers to the structure substantially formed only upon formation of the guide-target RNA scaffold, where nucleotides in either the engineered guide RNA or the target RNA are not complementary to their positional counterparts on the opposite strand and where one side of the internal loop, either on the target RNA side or the engineered guide RNA side of the guide-target RNA scaffold, has 5 nucleotides or more. Where the number of participating nucleotides on both the guide RNA side and the target RNA side drops below 5, the resulting structure is no longer considered an internal loop, but rather, is considered a bulge or a mismatch, depending on the size of the structural feature. An internal loop can be a symmetrical internal loop or an asymmetrical internal loop. Internal loops present in the vicinity of the edit site can help with base flipping of the target A in the target RNA to be edited.

[0273] One side of the internal loop, either on the target RNA side or the engineered guide RNA side of the guide-target RNA scaffold, can be formed by from 5 to 150 nucleotides. One side of the internal loop can be formed by 5, 6, 7, 8, 9, 10, 11, 12, 13, 14, 15, 16, 17, 18, 19, 20, 25, 30, 35, 40, 45, 50, 55, 60, 65, 70, 75, 80, 85, 90, 95, 100, 105, 110, 115, 120, 125, 120, 135, 140, 145, 150, 200, 250, 300, 350, 400, 450, 500, 600, 700, 800, 900, or 1000 nucleotides, or any number of nucleotides therebetween. One side of the internal loop can be formed by 5 nucleotides. One side of the internal loop can be formed by 10 nucleotides. One side of the internal loop can be formed by 15 nucleotides. One side of the internal loop can be formed by 20 nucleotides. One side of the internal loop can be formed by 25 nucleotides. One side of the internal loop can be formed by 30 nucleotides. One side of the internal loop can be formed by 35 nucleotides. One side of the internal loop can be formed by 40 nucleotides. One side of the internal loop can be formed by 45 nucleotides. One side of the internal loop can be formed by 50 nucleotides. One side of the internal loop can be formed by 55 nucleotides. One side of the internal loop can be formed by 60 nucleotides. One side of the internal loop can be formed by 65 nucleotides. One side of the internal loop can be formed by 70 nucleotides. One side of the internal loop can be formed by 75 nucleotides. One side of the internal loop can be formed by 80 nucleotides. One side of the internal loop can be formed by 85 nucleotides. One side of the internal loop can be formed by 90 nucleotides. One side of the internal loop can be formed by 95 nucleotides. One side of the internal loop can be formed by 100 nucleotides. One side of the internal loop can be formed by 110 nucleotides. One side of the internal loop can be formed by 120 nucleotides. One side of the internal loop can be formed by 130 nucleotides. One side of the internal loop can be formed by 140 nucleotides. One side of the internal loop can be formed by 150 nucleotides. One side of the internal loop can be formed by 200 nucleotides. One side of the internal loop can be formed by 250 nucleotides. One side of the internal loop can be formed by 300 nucleotides. One side of the internal loop can be formed by 350 nucleotides. One side of the internal loop can be formed by 400 nucleotides. One side of the internal loop can be formed by 450 nucleotides. One side of the internal loop can be formed by 500 nucleotides. One side of the internal loop can be formed by 600 nucleotides. One side of the internal loop can be formed by 700 nucleotides. One side of the internal loop can be formed by 800 nucleotides. One side of the internal loop can be formed by 900 nucleotides. One side of the internal loop can be formed by 1000 nucleotides. Thus, an internal loop can be a structural feature formed from latent structure provided by an engineered latent guide RNA.

[0274] An internal loop can be a symmetrical internal loop or an asymmetrical internal loop. A symmetrical internal loop is formed when the same number of nucleotides is present on each side of the internal loop. For example, a symmetrical internal loop in a guide-target RNA scaffold of the present disclosure can have the same number of nucleotides on the engineered guide RNA side and the target RNA side of the guide-target RNA scaffold. A symmetrical internal loop of the present disclosure can be formed by 5 nucleotides on the engineered guide RNA side of the guide-target RNA scaffold target and 5 nucleotides on the target RNA side of the guide-target RNA scaffold. A symmetrical internal loop of the present disclosure can be formed by 6 nucleotides on the engineered guide RNA side of the guide-target RNA scaffold target and 6 nucleotides on the target RNA side of the guide-target RNA scaffold. A symmetrical internal loop of the present disclosure can be formed by 7 nucleotides on the engineered guide RNA side of the guide-target RNA scaffold target and 7 nucleotides on the target RNA side of the guide-target RNA scaffold. A symmetrical internal loop of the present disclosure can be formed by 8 nucleotides on the engineered guide RNA side of the guide-target RNA scaffold target and 8 nucleotides on the target RNA side of the guide-target RNA scaffold. A symmetrical internal loop of the present disclosure can be formed by 9 nucleotides on the engineered guide RNA side of the guide-target RNA scaffold target and 9 nucleotides on the target RNA side of the guide-target RNA scaffold. A symmetrical internal loop of the present disclosure can be formed by 10 nucleotides on the engineered guide RNA side of the guide-target RNA scaffold target and 10 nucleotides on the target RNA side of the guide-target RNA scaffold. A symmetrical internal loop of the present disclosure can be formed by 15 nucleotides on the engineered guide RNA side of the guide-target RNA scaffold target and 15 nucleotides on the target RNA side of the guide-target RNA scaffold. A symmetrical internal loop of the present disclosure can be formed by 20 nucleotides on the engineered guide RNA side of the guide-target RNA scaffold target and 20 nucleotides on the target RNA side of the guide-target RNA scaffold. A symmetrical internal loop of the present disclosure can be formed by 30 nucleotides on the engineered guide RNA side of the guide-target RNA scaffold target and 30 nucleotides on the target RNA side of the guide-target RNA scaffold. A symmetrical internal loop of the present disclosure can be formed by 40 nucleotides on the engineered guide RNA side of the guide-target RNA scaffold target and 40 nucleotides on the target RNA side of the guide-target RNA scaffold. A symmetrical internal loop of the present disclosure can be formed by 50 nucleotides on the engineered guide RNA side of the guide-target RNA scaffold target and 50 nucleotides on the target RNA side of the guide-target RNA scaffold. A symmetrical internal loop of the present disclosure can be formed by 60 nucleotides on the engineered guide RNA side of the guide-target RNA scaffold target and 60 nucleotides on the target RNA side of the guide-target RNA scaffold. A symmetrical internal loop of the present disclosure can be formed by 70 nucleotides on the engineered guide RNA side of the guide-target RNA scaffold target and 70 nucleotides on the target RNA side of the guide-target RNA scaffold. A symmetrical internal loop of the present disclosure can be formed by 80 nucleotides on the engineered guide RNA side of the guide-target RNA scaffold target and 80 nucleotides on the target RNA side of the guide-target RNA scaffold. A symmetrical internal loop of the present disclosure can be formed by 90 nucleotides on the engineered guide RNA side of the guide-target RNA scaffold target and 90 nucleotides on the target RNA side of the guide-target RNA scaffold. A symmetrical internal loop of the present disclosure can be formed by 100 nucleotides on the engineered guide RNA side of the guide-target RNA scaffold target and 100 nucleotides on the target RNA side of the guide-target RNA scaffold. A symmetrical internal loop of the present disclosure can be formed by 110 nucleotides on the engineered guide RNA side of the guide-target RNA scaffold target and 110 nucleotides on the target RNA side of the guide-target RNA scaffold. A symmetrical internal loop of the present disclosure can be formed by 120 nucleotides on the engineered guide RNA side of the guide-target RNA scaffold target and 120 nucleotides on the target RNA side of the guide-target RNA scaffold. A symmetrical internal loop of the present disclosure can be formed by 130 nucleotides on the engineered guide RNA side of the guide-target RNA scaffold target and 130 nucleotides on the target RNA side of the guide-target RNA scaffold. A symmetrical internal loop of the present disclosure can be formed by 140 nucleotides on the engineered guide RNA side of the guide-target RNA scaffold target and 140 nucleotides on the target RNA side of the guide-target RNA scaffold. A symmetrical internal loop of the present disclosure can be formed by 150 nucleotides on the engineered guide RNA side of the guide-target RNA scaffold target and 150 nucleotides on the target RNA side of the guide-target RNA scaffold. A symmetrical internal loop of the present disclosure can be formed by 200 nucleotides on the engineered guide RNA side of the guide-target RNA scaffold target and 200 nucleotides on the target RNA side of the guide-target RNA scaffold. A symmetrical internal loop of the present disclosure can be formed by 250 nucleotides on the engineered guide RNA side of the guide-target RNA scaffold target and 250 nucleotides on the target RNA side of the guide-target RNA scaffold. A symmetrical internal loop of the present disclosure can be formed by 300 nucleotides on the engineered guide RNA side of the guide-target RNA scaffold target and 300 nucleotides on the target RNA side of the guide-target RNA scaffold. A symmetrical internal loop of the present disclosure can be formed by 350 nucleotides on the engineered guide RNA side of the guide-target RNA scaffold target and 350 nucleotides on the target RNA side of the guide-target RNA scaffold. A symmetrical internal loop of the present disclosure can be formed by 400 nucleotides on the engineered guide RNA side of the guide-target RNA scaffold target and 400 nucleotides on the target RNA side of the guide-target RNA scaffold. A symmetrical internal loop of the present disclosure can be formed by 450 nucleotides on the engineered guide RNA side of the guide-target RNA scaffold target and 450 nucleotides on the target RNA side of the guide-target RNA scaffold. A symmetrical internal loop of the present disclosure can be formed by 500 nucleotides on the engineered guide RNA side of the guide-target RNA scaffold target and 500 nucleotides on the target RNA side of the guide-target RNA scaffold. A symmetrical internal loop of the present disclosure can be formed by 600 nucleotides on the engineered guide RNA side of the guide-target RNA scaffold target and 600 nucleotides on the target RNA side of the guide-target RNA scaffold. A symmetrical internal loop of the present disclosure can be formed by 700 nucleotides on the engineered guide RNA side of the guide-target RNA scaffold target and 700 nucleotides on the target RNA side of the guide-target RNA scaffold. A symmetrical internal loop of the present disclosure can be formed by 800 nucleotides on the engineered guide RNA side of the guide-target RNA scaffold target and 800 nucleotides on the target RNA side of the guide-target RNA scaffold. A symmetrical internal loop of the present disclosure can be formed by 900 nucleotides on the engineered guide RNA side of the guide-target RNA scaffold target and 900 nucleotides on the target RNA side of the guide-target RNA scaffold. A symmetrical internal loop of the present disclosure can be formed by 1000 nucleotides on the engineered guide RNA side of the guide-target RNA scaffold target and 1000 nucleotides on the target RNA side of the guide-target RNA scaffold. Thus, a symmetrical internal loop can be a structural feature formed from latent structure provided by an engineered latent guide RNA.

[0275] An asymmetrical internal loop is formed when a different number of nucleotides is present on each side of the internal loop. For example, an asymmetrical internal loop in a guide-target RNA scaffold of the present disclosure can have different numbers of nucleotides on the engineered guide RNA side and the target RNA side of the guide-target RNA scaffold.

[0276] An asymmetrical internal loop of the present disclosure can be formed by from 5 to 150 nucleotides on the engineered guide RNA side of the guide-target RNA scaffold and from 5 to 150 nucleotides on the target RNA side of the guide-target RNA scaffold, wherein the number of nucleotides is the different on the engineered side of the guide-target RNA scaffold target than the number of nucleotides on the target RNA side of the guide-target RNA scaffold. An asymmetrical internal loop of the present disclosure can be formed by from 5 to 1000 nucleotides on the engineered guide RNA side of the guide-target RNA scaffold and from 5 to 1000 nucleotides on the target RNA side of the guide-target RNA scaffold, wherein the number of nucleotides is the different on the engineered side of the guide-target RNA scaffold target than the number of nucleotides on the target RNA side of the guide-target RNA scaffold. An asymmetrical internal loop of the present disclosure can be formed by 5 nucleotides on the engineered guide RNA side of the guide-target RNA scaffold and 6 nucleotides on the target RNA side of the guide-target RNA scaffold. An asymmetrical internal loop of the present disclosure can be formed by 5 nucleotides on the target RNA side of the guide-target RNA scaffold and 6 nucleotides on the engineered guide RNA side of the guide-target RNA scaffold. An asymmetrical internal loop of the present disclosure can be formed by 5 nucleotides on the engineered guide RNA side of the guide-target RNA scaffold and 7 nucleotides on the target RNA side of the guide-target RNA scaffold. An asymmetrical internal loop of the present disclosure can be formed by 5 nucleotides on the target RNA side of the guide-target RNA scaffold and 7 nucleotides on the engineered guide RNA side of the guide-target RNA scaffold. An asymmetrical internal loop of the present disclosure can be formed by 5 nucleotides on the engineered guide RNA side of the guide-target RNA scaffold and 8 nucleotides internal loop the target RNA side of the guide-target RNA scaffold. An asymmetrical internal loop of the present disclosure can be formed by 5 nucleotides on the target RNA side of the guide-target RNA scaffold and 8 nucleotides on the engineered guide RNA side of the guide-target RNA scaffold. An asymmetrical internal loop of the present disclosure can be formed by 5 nucleotides on the engineered guide RNA side of the guide-target RNA scaffold and 9 nucleotides internal loop the target RNA side of the guide-target RNA scaffold. An asymmetrical internal loop of the present disclosure can be formed by 5 nucleotides on the target RNA side of the guide-target RNA scaffold and 9 nucleotides on the engineered guide RNA side of the guide-target RNA scaffold. An asymmetrical internal loop of the present disclosure can be formed by 5 nucleotides on the engineered guide RNA side of the guide-target RNA scaffold and 10 nucleotides internal loop the target RNA side of the guide-target RNA scaffold. An asymmetrical internal loop of the present disclosure can be formed by 5 nucleotides on the target RNA side of the guide-target RNA scaffold and 10 nucleotides on the engineered guide RNA side of the guide-target RNA scaffold. An asymmetrical internal loop of the present disclosure can be formed by 6 nucleotides on the engineered guide RNA side of the guide-target RNA scaffold and 7 nucleotides internal loop the target RNA side of the guide-target RNA scaffold. An asymmetrical internal loop of the present disclosure can be formed by 6 nucleotides on the target RNA side of the guide-target RNA scaffold and 7 nucleotides on the engineered guide RNA side of the guide-target RNA scaffold. An asymmetrical internal loop of the present disclosure can be formed by 6 nucleotides on the engineered guide RNA side of the guide-target RNA scaffold and 8 nucleotides internal loop the target RNA side of the guide-target RNA scaffold. An asymmetrical internal loop of the present disclosure can be formed by 6 nucleotides on the target RNA side of the guide-target RNA scaffold and 8 nucleotides on the engineered guide RNA side of the guide-target RNA scaffold. An asymmetrical internal loop of the present disclosure can be formed by 6 nucleotides on the engineered guide RNA side of the guide-target RNA scaffold and 9 nucleotides internal loop the target RNA side of the guide-target RNA scaffold. An asymmetrical internal loop of the present disclosure can be formed by 6 nucleotides on the target RNA side of the guide-target RNA scaffold and 9 nucleotides on the engineered guide RNA side of the guide-target RNA scaffold. An asymmetrical internal loop of the present disclosure can be formed by 6 nucleotides on the engineered guide RNA side of the guide-target RNA scaffold and 10 nucleotides internal loop the target RNA side of the guide-target RNA scaffold. An asymmetrical internal loop of the present disclosure can be formed by 6 nucleotides on the target RNA side of the guide-target RNA scaffold and 10 nucleotides on the engineered guide RNA side of the guide-target RNA scaffold. An asymmetrical internal loop of the present disclosure can be formed by 7 nucleotides on the engineered guide RNA side of the guide-target RNA scaffold and 8 nucleotides internal loop the target RNA side of the guide-target RNA scaffold. An asymmetrical internal loop of the present disclosure can be formed by 7 nucleotides on the target RNA side of the guide-target RNA scaffold and 8 nucleotides on the engineered guide RNA side of the guide-target RNA scaffold. An asymmetrical internal loop of the present disclosure can be formed by 7 nucleotides on the engineered guide RNA side of the guide-target RNA scaffold and 9 nucleotides internal loop the target RNA side of the guide-target RNA scaffold. An asymmetrical internal loop of the present disclosure can be formed by 7 nucleotides on the target RNA side of the guide-target RNA scaffold and 9 nucleotides on the engineered guide RNA side of the guide-target RNA scaffold. An asymmetrical internal loop of the present disclosure can be formed by 7 nucleotides on the engineered guide RNA side of the guide-target RNA scaffold and 10 nucleotides internal loop the target RNA side of the guide-target RNA scaffold. An asymmetrical internal loop of the present disclosure can be formed by 7 nucleotides on the target RNA side of the guide-target RNA scaffold and 10 nucleotides on the engineered guide RNA side of the guide-target RNA scaffold. An asymmetrical internal loop of the present disclosure can be formed by 8 nucleotides on the engineered guide RNA side of the guide-target RNA scaffold and 9 nucleotides internal loop the target RNA side of the guide-target RNA scaffold. An asymmetrical internal loop of the present disclosure can be formed by 8 nucleotides on the target RNA side of the guide-target RNA scaffold and 9 nucleotides on the engineered guide RNA side of the guide-target RNA scaffold. An asymmetrical internal loop of the present disclosure can be formed by 8 nucleotides on the engineered guide RNA side of the guide-target RNA scaffold and 10 nucleotides internal loop the target RNA side of the guide-target RNA scaffold. An asymmetrical internal loop of the present disclosure can be formed by 8 nucleotides on the target RNA side of the guide-target RNA scaffold and 10 nucleotides on the engineered guide RNA side of the guide-target RNA scaffold. An asymmetrical internal loop of the present disclosure can be formed by 9 nucleotides on the engineered guide RNA side of the guide-target RNA scaffold and 10 nucleotides internal loop the target RNA side of the guide-target RNA scaffold. An asymmetrical internal loop of the present disclosure can be formed by 9 nucleotides on the target RNA side of the guide-target RNA scaffold and 10 nucleotides on the engineered guide RNA side of the guide-target RNA scaffold. An asymmetrical internal loop of the present disclosure can be formed by 5 nucleotides on the target RNA side of the guide-target RNA scaffold and 50 nucleotides on the engineered guide RNA side of the guide-target RNA scaffold. An asymmetrical internal loop of the present disclosure can be formed by 5 nucleotides on the target RNA side of the guide-target RNA scaffold and 100 nucleotides on the engineered guide RNA side of the guide-target RNA scaffold. An asymmetrical internal loop of the present disclosure can be formed by 5 nucleotides on the target RNA side of the guide-target RNA scaffold and 150 nucleotides on the engineered guide RNA side of the guide-target RNA scaffold. An asymmetrical internal loop of the present disclosure can be formed by 5 nucleotides on the target RNA side of the guide-target RNA scaffold and 200 nucleotides on the engineered guide RNA side of the guide-target RNA scaffold. An asymmetrical internal loop of the present disclosure can be formed by 5 nucleotides on the target RNA side of the guide-target RNA scaffold and 300 nucleotides on the engineered guide RNA side of the guide-target RNA scaffold. An asymmetrical internal loop of the present disclosure can be formed by 5 nucleotides on the target RNA side of the guide-target RNA scaffold and 400 nucleotides on the engineered guide RNA side of the guide-target RNA scaffold. An asymmetrical internal loop of the present disclosure can be formed by 5 nucleotides on the target RNA side of the guide-target RNA scaffold and 500 nucleotides on the engineered guide RNA side of the guide-target RNA scaffold. An asymmetrical internal loop of the present disclosure can be formed by 5 nucleotides on the target RNA side of the guide-target RNA scaffold and 1000 nucleotides on the engineered guide RNA side of the guide-target RNA scaffold. An asymmetrical internal loop of the present disclosure can be formed by 1000 nucleotides on the target RNA side of the guide-target RNA scaffold and 5 nucleotides on the engineered guide RNA side of the guide-target RNA scaffold. An asymmetrical internal loop of the present disclosure can be formed by 500 nucleotides on the target RNA side of the guide-target RNA scaffold and 5 nucleotides on the engineered guide RNA side of the guide-target RNA scaffold. An asymmetrical internal loop of the present disclosure can be formed by 400 nucleotides on the target RNA side of the guide-target RNA scaffold and 5 nucleotides on the engineered guide RNA side of the guide-target RNA scaffold. An asymmetrical internal loop of the present disclosure can be formed by 300 nucleotides on the target RNA side of the guide-target RNA scaffold and 5 nucleotides on the engineered guide RNA side of the guide-target RNA scaffold. An asymmetrical internal loop of the present disclosure can be formed by 200 nucleotides on the target RNA side of the guide-target RNA scaffold and 5 nucleotides on the engineered guide RNA side of the guide-target RNA scaffold. An asymmetrical internal loop of the present disclosure can be formed by 150 nucleotides on the target RNA side of the guide-target RNA scaffold and 5 nucleotides on the engineered guide RNA side of the guide-target RNA scaffold. An asymmetrical internal loop of the present disclosure can be formed by 100 nucleotides on the target RNA side of the guide-target RNA scaffold and 5 nucleotides on the engineered guide RNA side of the guide-target RNA scaffold. An asymmetrical internal loop of the present disclosure can be formed by 50 nucleotides on the target RNA side of the guide-target RNA scaffold and 5 nucleotides on the engineered guide RNA side of the guide-target RNA scaffold. An asymmetrical internal loop of the present disclosure can be formed by 50 nucleotides on the target RNA side of the guide-target RNA scaffold and 100 nucleotides on the engineered guide RNA side of the guide-target RNA scaffold. An asymmetrical internal loop of the present disclosure can be formed by 50 nucleotides on the target RNA side of the guide-target RNA scaffold and 150 nucleotides on the engineered guide RNA side of the guide-target RNA scaffold. An asymmetrical internal loop of the present disclosure can be formed by 50 nucleotides on the target RNA side of the guide-target RNA scaffold and 200 nucleotides on the engineered guide RNA side of the guide-target RNA scaffold. An asymmetrical internal loop of the present disclosure can be formed by 50 nucleotides on the target RNA side of the guide-target RNA scaffold and 300 nucleotides on the engineered guide RNA side of the guide-target RNA scaffold. An asymmetrical internal loop of the present disclosure can be formed by 50 nucleotides on the target RNA side of the guide-target RNA scaffold and 400 nucleotides on the engineered guide RNA side of the guide-target RNA scaffold. An asymmetrical internal loop of the present disclosure can be formed by 50 nucleotides on the target RNA side of the guide-target RNA scaffold and 500 nucleotides on the engineered guide RNA side of the guide-target RNA scaffold. An asymmetrical internal loop of the present disclosure can be formed by 50 nucleotides on the target RNA side of the guide-target RNA scaffold and 1000 nucleotides on the engineered guide RNA side of the guide-target RNA scaffold. An asymmetrical internal loop of the present disclosure can be formed by 1000 nucleotides on the target RNA side of the guide-target RNA scaffold and 50 nucleotides on the engineered guide RNA side of the guide-target RNA scaffold. An asymmetrical internal loop of the present disclosure can be formed by 500 nucleotides on the target RNA side of the guide-target RNA scaffold and 50 nucleotides on the engineered guide RNA side of the guide-target RNA scaffold. An asymmetrical internal loop of the present disclosure can be formed by 400 nucleotides on the target RNA side of the guide-target RNA scaffold and 50 nucleotides on the engineered guide RNA side of the guide-target RNA scaffold. An asymmetrical internal loop of the present disclosure can be formed by 300 nucleotides on the target RNA side of the guide-target RNA scaffold and 50 nucleotides on the engineered guide RNA side of the guide-target RNA scaffold. An asymmetrical internal loop of the present disclosure can be formed by 200 nucleotides on the target RNA side of the guide-target RNA scaffold and 50 nucleotides on the engineered guide RNA side of the guide-target RNA scaffold. An asymmetrical internal loop of the present disclosure can be formed by 150 nucleotides on the target RNA side of the guide-target RNA scaffold and 50 nucleotides on the engineered guide RNA side of the guide-target RNA scaffold. An asymmetrical internal loop of the present disclosure can be formed by 100 nucleotides on the target RNA side of the guide-target RNA scaffold and 50 nucleotides on the engineered guide RNA side of the guide-target RNA scaffold. An asymmetrical internal loop of the present disclosure can be formed by 100 nucleotides on the target RNA side of the guide-target RNA scaffold and 150 nucleotides on the engineered guide RNA side of the guide-target RNA scaffold. An asymmetrical internal loop of the present disclosure can be formed by 100 nucleotides on the target RNA side of the guide-target RNA scaffold and 200 nucleotides on the engineered guide RNA side of the guide-target RNA scaffold. An asymmetrical internal loop of the present disclosure can be formed by 100 nucleotides on the target RNA side of the guide-target RNA scaffold and 300 nucleotides on the engineered guide RNA side of the guide-target RNA scaffold. An asymmetrical internal loop of the present disclosure can be formed by 100 nucleotides on the target RNA side of the guide-target RNA scaffold and 400 nucleotides on the engineered guide RNA side of the guide-target RNA scaffold. An asymmetrical internal loop of the present disclosure can be formed by 100 nucleotides on the target RNA side of the guide-target RNA scaffold and 500 nucleotides on the engineered guide RNA side of the guide-target RNA scaffold. An asymmetrical internal loop of the present disclosure can be formed by 100 nucleotides on the target RNA side of the guide-target RNA scaffold and 1000 nucleotides on the engineered guide RNA side of the guide-target RNA scaffold. An asymmetrical internal loop of the present disclosure can be formed by 1000 nucleotides on the target RNA side of the guide-target RNA scaffold and 100 nucleotides on the engineered guide RNA side of the guide-target RNA scaffold. An asymmetrical internal loop of the present disclosure can be formed by 500 nucleotides on the target RNA side of the guide-target RNA scaffold and 100 nucleotides on the engineered guide RNA side of the guide-target RNA scaffold. An asymmetrical internal loop of the present disclosure can be formed by 400 nucleotides on the target RNA side of the guide-target RNA scaffold and 100 nucleotides on the engineered guide RNA side of the guide-target RNA scaffold. An asymmetrical internal loop of the present disclosure can be formed by 300 nucleotides on the target RNA side of the guide-target RNA scaffold and 100 nucleotides on the engineered guide RNA side of the guide-target RNA scaffold. An asymmetrical internal loop of the present disclosure can be formed by 200 nucleotides on the target RNA side of the guide-target RNA scaffold and 100 nucleotides on the engineered guide RNA side of the guide-target RNA scaffold. An asymmetrical internal loop of the present disclosure can be formed by 150 nucleotides on the target RNA side of the guide-target RNA scaffold and 100 nucleotides on the engineered guide RNA side of the guide-target RNA scaffold. An asymmetrical internal loop of the present disclosure can be formed by 150 nucleotides on the target RNA side of the guide-target RNA scaffold and 200 nucleotides on the engineered guide RNA side of the guide-target RNA scaffold. An asymmetrical internal loop of the present disclosure can be formed by 150 nucleotides on the target RNA side of the guide-target RNA scaffold and 300 nucleotides on the engineered guide RNA side of the guide-target RNA scaffold. An asymmetrical internal loop of the present disclosure can be formed by 150 nucleotides on the target RNA side of the guide-target RNA scaffold and 400 nucleotides on the engineered guide RNA side of the guide-target RNA scaffold. An asymmetrical internal loop of the present disclosure can be formed by 150 nucleotides on the target RNA side of the guide-target RNA scaffold and 500 nucleotides on the engineered guide RNA side of the guide-target RNA scaffold. An asymmetrical internal loop of the present disclosure can be formed by 150 nucleotides on the target RNA side of the guide-target RNA scaffold and 1000 nucleotides on the engineered guide RNA side of the guide-target RNA scaffold. An asymmetrical internal loop of the present disclosure can be formed by 1000 nucleotides on the target RNA side of the guide-target RNA scaffold and 150 nucleotides on the engineered guide RNA side of the guide-target RNA scaffold. An asymmetrical internal loop of the present disclosure can be formed by 500 nucleotides on the target RNA side of the guide-target RNA scaffold and 5 nucleotides on the engineered guide RNA side of the guide-target RNA scaffold. An asymmetrical internal loop of the present disclosure can be formed by 400 nucleotides on the target RNA side of the guide-target RNA scaffold and 150 nucleotides on the engineered guide RNA side of the guide-target RNA scaffold. An asymmetrical internal loop of the present disclosure can be formed by 300 nucleotides on the target RNA side of the guide-target RNA scaffold and 150 nucleotides on the engineered guide RNA side of the guide-target RNA scaffold. An asymmetrical internal loop of the present disclosure can be formed by 200 nucleotides on the target RNA side of the guide-target RNA scaffold and 300 nucleotides on the engineered guide RNA side of the guide-target RNA scaffold. An asymmetrical internal loop of the present disclosure can be formed by 200 nucleotides on the target RNA side of the guide-target RNA scaffold and 400 nucleotides on the engineered guide RNA side of the guide-target RNA scaffold. An asymmetrical internal loop of the present disclosure can be formed by 200 nucleotides on the target RNA side of the guide-target RNA scaffold and 500 nucleotides on the engineered guide RNA side of the guide-target RNA scaffold. An asymmetrical internal loop of the present disclosure can be formed by 200 nucleotides on the target RNA side of the guide-target RNA scaffold and 1000 nucleotides on the engineered guide RNA side of the guide-target RNA scaffold. An asymmetrical internal loop of the present disclosure can be formed by 1000 nucleotides on the target RNA side of the guide-target RNA scaffold and 200 nucleotides on the engineered guide RNA side of the guide-target RNA scaffold. An asymmetrical internal loop of the present disclosure can be formed by 500 nucleotides on the target RNA side of the guide-target RNA scaffold and 200 nucleotides on the engineered guide RNA side of the guide-target RNA scaffold. An asymmetrical internal loop of the present disclosure can be formed by 400 nucleotides on the target RNA side of the guide-target RNA scaffold and 200 nucleotides on the engineered guide RNA side of the guide-target RNA scaffold. An asymmetrical internal loop of the present disclosure can be formed by 300 nucleotides on the target RNA side of the guide-target RNA scaffold and 200 nucleotides on the engineered guide RNA side of the guide-target RNA scaffold. An asymmetrical internal loop of the present disclosure can be formed by 300 nucleotides on the target RNA side of the guide-target RNA scaffold and 400 nucleotides on the engineered guide RNA side of the guide-target RNA scaffold. An asymmetrical internal loop of the present disclosure can be formed by 300 nucleotides on the target RNA side of the guide-target RNA scaffold and 500 nucleotides on the engineered guide RNA side of the guide-target RNA scaffold. An asymmetrical internal loop of the present disclosure can be formed by 300 nucleotides on the target RNA side of the guide-target RNA scaffold and 1000 nucleotides on the engineered guide RNA side of the guide-target RNA scaffold. An asymmetrical internal loop of the present disclosure can be formed by 1000 nucleotides on the target RNA side of the guide-target RNA scaffold and 300 nucleotides on the engineered guide RNA side of the guide-target RNA scaffold. An asymmetrical internal loop of the present disclosure can be formed by 500 nucleotides on the target RNA side of the guide-target RNA scaffold and 300 nucleotides on the engineered guide RNA side of the guide-target RNA scaffold. An asymmetrical internal loop of the present disclosure can be formed by 400 nucleotides on the target RNA side of the guide-target RNA scaffold and 300 nucleotides on the engineered guide RNA side of the guide-target RNA scaffold. An asymmetrical internal loop of the present disclosure can be formed by 400 nucleotides on the target RNA side of the guide-target RNA scaffold and 500 nucleotides on the engineered guide RNA side of the guide-target RNA scaffold. An asymmetrical internal loop of the present disclosure can be formed by 400 nucleotides on the target RNA side of the guide-target RNA scaffold and 1000 nucleotides on the engineered guide RNA side of the guide-target RNA scaffold. An asymmetrical internal loop of the present disclosure can be formed by 1000 nucleotides on the target RNA side of the guide-target RNA scaffold and 400 nucleotides on the engineered guide RNA side of the guide-target RNA scaffold. An asymmetrical internal loop of the present disclosure can be formed by 500 nucleotides on the target RNA side of the guide-target RNA scaffold and 400 nucleotides on the engineered guide RNA side of the guide-target RNA scaffold. An asymmetrical internal loop of the present disclosure can be formed by 500 nucleotides on the target RNA side of the guide-target RNA scaffold and 1000 nucleotides on the engineered guide RNA side of the guide-target RNA scaffold. An asymmetrical internal loop of the present disclosure can be formed by 1000 nucleotides on the target RNA side of the guide-target RNA scaffold and 500 nucleotides on the engineered guide RNA side of the guide-target RNA scaffold. Thus, an asymmetrical internal loop can be a structural feature formed from latent structure provided by an engineered latent guide RNA.

[0277] As described herein, a “micro-footprint” sequence refers to a sequence with latent structures that, when manifested, facilitate editing of the adenosine of a target RNA via an adenosine deaminase enzyme. A macro-footprint can serve to guide or focus an RNA editing entity (e.g., ADAR) and direct its activity towards a micro-footprint. In some embodiments, included within the micro-footprint sequence is a nucleotide that is positioned such that, when the guide RNA is hybridized to the target RNA, said nucleotide is opposite the adenosine to be edited by the ADAR enzyme and does not base pair with the adenosine to be edited. This nucleotide is referred to herein as the “mismatched position” or “mismatch” and can be a cytosine. Micro-footprint sequences as described herein have, upon hybridization of the engineered guide RNA and target RNA, at least one structural feature selected from the group consisting of: a bulge, an internal loop, a mismatch, a hairpin, and any combination thereof. Engineered guide RNAs with superior micro-footprint sequences can be selected based on their ability to facilitate editing of a specific target RNA. Engineered guide RNAs selected for their ability to facilitate editing of a specific target are capable of adopting various micro-footprint latent structures, which can vary on a target-by-target basis.

[0278] Guide RNAs of the present disclosure may further comprise a macro-footprint. In some embodiments, the macro-footprint comprises a barbell macro-footprint. A micro-footprint can serve to guide or focus an RNA editing enzyme and direct its activity towards the target adenosine to be edited. A “barbell” as described herein refers to a pair of internal loop latent structural features that manifest upon hybridization of the guide RNA to the target RNA. In some embodiments, each internal loop is positioned towards the 5′ end or the 3′ end of the guide-target RNA scaffold formed upon hybridization of the guide RNA and the target RNA. In some embodiments, each internal loop flanks opposing sides of the micro-footprint sequence. Insertion of a barbell macro-footprint sequence flanking opposing sides of the micro-footprint sequence, upon hybridization of the guide RNA to the target RNA, results in formation of barbell internal loops on opposing sides of the micro-footprint, which in turn comprises at least one structural feature that facilitates editing of a specific target RNA.

[0279] In some embodiments, the presence of barbells flanking the micro-footprint can improve one or more aspects of editing. For example, the presence of a barbell macro-footprint in addition to a micro-footprint can result in a higher amount of on target adenosine editing, relative to an otherwise comparable guide RNA lacking the barbells. Additionally, and or alternatively, the presence of a barbell macro-footprint in addition to a micro-footprint can result in a lower amount of local off-target adenosine editing, relative to an otherwise comparable guide RNA lacking the barbells. Further, while the effect of various micro-footprint structural features can vary on a target-by-target basis based on selection in a high throughput screen, the increase in the one or more aspects of editing provided by the barbell macro-footprint structures can be independent of the particular target RNA. Thus, inclusion of barbell structures can provide a facile method of improving editing of guide RNAs previously selected to facilitate editing of a target RNA of interest. For example, macro-footprints (e.g., barbell macro-footprints) and micro-footprints can provide an increased amount of on target adenosine editing relative to an otherwise comparable guide RNA lacking the barbells. In other embodiments, the presence of the barbell macro-footprint in addition to the micro-footprint can result in a lower amount of local off-target adenosine editing, relative to an otherwise comparable guide RNA, upon hybridization of the guide RNA and target RNA to form a guide-target RNA scaffold lacking the barbells.

[0280] As disclosed herein, a “macro-footprint” sequence can be positioned such that it flanks a micro-footprint sequence. Further, while a macro-footprint sequence can flank a micro-footprint sequence, additional latent structures can be incorporated that flank either end of the macro-footprint as well. In some embodiments, such additional latent structures are included as part of the macro-footprint. In some embodiments, such additional latent structures are separate, distinct, or both separate and distinct from the macro-footprint. In some embodiments, a macro-footprint sequence can comprise a barbell macro-footprint sequence comprising latent structures that, when manifested, produce a first internal loop and a second internal loop.

[0281] In some embodiments, the first internal loop of the barbell or the second internal loop of the barbell is positioned at least about 5 bases (e.g., 6, 7, 8, 9, 10, 11, 12, 13, 14, 15, 16, 17, 18, 19, 20, 21, 22, 23, 24, 25, 26, 27, 28, 29, 30, 31, 32, 33, 34, 35, 36, 37, 38, 39, 40, 41, 42, 43, 44, 45, 46, 47, 48, 49, or 50 bases) away from the A/C mismatch with respect to the base of the first internal loop or the second internal loop that is the most proximal to the A/C mismatch. In some embodiments, the first internal loop of the barbell or the second internal loop of the barbell is positioned at most about 50 bases away from the A/C mismatch (e.g., 49, 48, 47, 46, 45, 44, 43, 42, 41, 40, 39, 38, 37, 36, 35, 34, 33, 32, 31, 30, 29, 28, 27, 26, 25, 24, 23, 22, 21, 20, 19, 18, 17, 16, 15, 14, 13, 12, 11, 10, 9, 8, 7, 6, 5) with respect to the base of the first internal loop or the second internal loop that is the most proximal to the A/C mismatch.

[0282] In some embodiments, a first internal loop or a second internal loop independently comprises a number of bases of at least about 5 bases or greater (e.g., 6, 7, 8, 9, 10, 11, 12, 13, 14, 15, 16, 17, 18, 19, 20, 30, 40, 50, 60, 70, 80, 90, 100, 110, 120, 130, 140, 150); about 150 bases or fewer (e.g., 145, 135, 125, 115, 95, 85, 75, 65, 55, 45, 35, 25, 19, 18, 17, 16, 15, 14, 13, 12, 11, 10, 9, 8, 7, 6, 5); or at least about 5 bases to at least about 150 bases (e.g., 5-150, 6-145, 7-140, 8-135, 9-130, 10-125, 11-120, 12-115, 13-110, 14-105, 15-100, 16-95, 17-90, 18-85, 19-80, 20-75, 21-70, 22-65, 23-60, 24-55, 25-50) of the engineered guide RNA and a number of bases of at least about 5 bases or greater (e.g., 6, 7, 8, 9, 10, 11, 12, 13, 14, 15, 16, 17, 18, 19, 20, 30, 40, 50, 60, 70, 80, 90, 100, 110, 120, 130, 140, 150); about 150 bases or fewer (e.g., 145, 135, 125, 115, 95, 85, 75, 65, 55, 45, 35, 25, 19, 18, 17, 16, 15, 14, 13, 12, 11, 10, 9, 8, 7, 6, 5); or at least about 5 bases to at least about 150 bases (e.g., 5-150, 6-145, 7-140, 8-135, 9-130, 10-125, 11-120, 12-115, 13-110, 14-105, 15-100, 16-95, 17-90, 18-85, 19-80, 20-75, 21-70, 22-65, 23-60, 24-55, 25-50) of the target RNA.

[0283] As disclosed herein, a “base paired (bp) region” refers to a region of the guide-target RNA scaffold in which bases in the guide RNA are paired with opposing bases in the target RNA. Base paired regions can extend from one end or proximal to one end of the guide-target RNA scaffold to or proximal to the other end of the guide-target RNA scaffold. Base paired regions can extend between two structural features. Base paired regions can extend from one end or proximal to one end of the guide-target RNA scaffold to or proximal to a structural feature. Base paired regions can extend from a structural feature to the other end of the guide-target RNA scaffold. In some embodiments, a base paired region has from 1 bp to 100 bp, from 1 bp to 90 bp, from 1 bp to 80 bp, from 1 bp to 70 bp, from 1 bp to 60 bp, from 1 bp to 50 bp, from 1 bp to 45 bp, from 1 bp to 40 bp, from 1 bp to 35 bp, from 1 bp to 30 bp, from 1 bp to 25 bp, from 1 bp to 20 bp, from 1 bp to 15 bp, from 1 bp to 10 bp, from 1 bp to 5 bp, from 5 bp to 10 bp, from 5 bp to 20 bp, from 10 bp to 20 bp, from 10 bp to 50 bp, from 5 bp to 50 bp, at least 1 bp, at least 2 bp, at least 3 bp, at least 4 bp, at least 5 bp, at least 6 bp, at least 7 bp, at least 8 bp, at least 9 bp, at least 10 bp, at least 12 bp, at least 14 bp, at least 16 bp, at least 18 bp, at least 20 bp, at least 25 bp, at least 30 bp, at least 35 bp, at least 40 bp, at least 45 bp, at least 50 bp, at least 60 bp, at least 70 bp, at least 80 bp, at least 90 bp, at least 100 bp.

[0284] Guide RNA Expression Cassettes. A guide RNA expression cassette may comprise a promoter (e.g., any of SEQ ID NO: 13-SEQ ID NO: 17, SEQ ID NO: 167-SEQ ID NO: 707, SEQ ID NO: 1241, SEQ ID NO: 1248-SEQ ID NO: 1253, or SEQ ID NO: 1259-SEQ ID NO: 1263), a guide RNA sequence, a structural element, and a termination sequence (e.g., any of SEQ ID NO: 60, SEQ ID NO: 708-SEQ ID NO: 1240, SEQ ID NO: 1242, SEQ ID NO: 1243-SEQ ID NO: 1247, SEQ ID NO: 1254-SEQ ID NO: 1257, SEQ ID NO: 1264-SEQ ID NO: 1272, SEQ ID NO: 1275, or SEQ ID NO: 1287-SEQ ID NO: 1289). A guide RNA sequence may target a target RNA. In some embodiments, the target RNA encodes α-synuclein (SNCA), peripheral myelin protein 22 (PMP22), double homeobox 4 (DUX4), leucine rich repeat kinase 2 (LRRK2), Tau (MAPT), progranulin (GRN), a duplication of the PMP22 associated with Charcot-Marie-Tooth disease type 1A (CMT1A), ATP-binding cassette sub-family A member 4 (ABCA4), amyloid precursor protein (APP), alpha-1 antitrypsin (SERPINA1), hexosaminidase A (HEXA), cystic fibrosis transmembrane conductance regulator (CFTR), lipase A (LIPA), glucosylceramidase beta (GBA), PTEN-induced kinase 1 (PINK1), or methyl CpG binding protein 2 (MECP2). Examples of engineered guide RNA expression cassettes comprising a promoter, a guide RNA sequence, a structural element, and a termination sequence are provided in TABLE 9.

TABLE 9
Exemplary Engineered Guide RNA Expression Cassettes

| | SEQ ID | |
|---|---|---|
| Target | NO: | Sequence |
| PMP22 | SEQ ID | TAACAACATAGGAGCTGTGATTGGCTGTTTTCAGCCAATCAGCA |
| | NO: 1 | CTGACTCATTTGCATAGCCTTTACAAGCGGTCACAAACTCAAGA |
| | | AACGAGCGGTTTTAATAGTCTTTTAGAATATTGTTTATCGAACCG |
| | | AATAAGGAACTGTGCTTTGTGATTCACATATCAGTGGAGGGGTG |
| | | TGGAAATGGCACCTTGATCTCACCCTCATCGAAAGTGGAGTTGA |
| | | TGTCCTTCCCTGGCTCGCTACAGACGCACTTCCGCGACCGCACCA |
| | | GCACCGCGACGTGGAGGACGATGATACTCAGCAACAGGAGGAG |
| | | CCCACTGGCGGCAAGTTCTGCTCAGCGGAGTTTCTGCCCGGCCA |
| | | AACAGCGTGTGGAATTTTTGGAGCAGGTTTTCTGACTTCGGTCGG |
| | | AAAACCCCTCCCAATTTCACTGGTCTACAATGAAAGCAAAACAG |
| | | TTCTCTTCCCCGCTCCCCGGTGTGTGAGAGGGGCTTTGATCCTTC |
| | | TCTGGTTTCCTAGGAAACGCGTATGTG |
| PMP22 | SEQ ID | TAACAACATAGGAGCTGTGATTGGCTGTTTTCAGCCAATCAGCA |
| | NO: 2 | CTGACTCATTTGCATAGCCTTTACAAGCGGTCACAAACTCAAGA |
| | | AACGAGCGGTTTTAATAGTCTTTTAGAATATTGTTTATCGAACCG |
| | | AATAAGGAACTGTGCTTTGTGATTCACATATCAGTGGAGGGGTG |
| | | TGGAAATGGCACCTTGATAAGTCACCATGAGTGTAAAGGGAGTT |
| | | GATGTCCTTCCCTGGCTCGCTACAGACGCACTTCCGCGACCGCAC |
| | | CAGCACCGCGACGTGGAGGACGATGATACTCAGCAACAGGAGG |
| | | AGCCCACTGGCGGCAAGTTCTGCTCAGCGGAGTTTCTGCCCGGC |
| | | CAAACAGCGTGTGGAATTTTTGGAGCAGGTTTTCTGACTTCGGTC |
| | | GGAAAACCCCTCCCAATTTCACTGGTCTACAATGAAAGCAAAAC |
| | | AGTTCTCTTCCCCGCTCCCCGGTGTGTGAGAGGGGCTTTGATCCT |
| | | TCTCTGGTTTCCTAGGAAACGCGTATGTG |
| PMP22 | SEQ ID | TAACAACATAGGAGCTGTGATTGGCTGTTTTCAGCCAATCAGCA |
| | NO: 3 | CTGACTCATTTGCATAGCCTTTACAAGCGGTCACAAACTCAAGA |
| | | AACGAGCGGTTTTAATAGTCTTTTAGAATATTGTTTATCGAACCG |
| | | AATAAGGAACTGTGCTTTGTGATTCACATATCAGTGGAGGGGTG |
| | | TGGAAATGGCACCTTGATCTCACCCTCATCGAAAGTGGAGTTGA |
| | | TGTCCTTCCCTGGCTCGCTACAGACGCACTTCCGCGACCGCACCA |
| | | GCACCGCGACGTGGAGGACGATGATACTCAGCAACAGGAGGAG |
| | | CCCACTGGCGGCAAGTTCTGCTCAGCGGAGTTTCTGCCCGGCCA |
| | | AACAGCGTGTGGAATTTTTGGAGCAGGTTTTCTGACTTCGGTCGG |
| | | AAAACCCCTCCCAATTTCACTGGTTTCAAAAACAGAAAAACAGT |
| | | TCTCGTTTCAAAAACAGATTCCCCGCTCCCCGGTGTGTGAGAGG |
| | | GGCTTTGATCCTTCTCTGGTTTCCTAGGAAACGCGTATGTG |
| PMP22 | SEQ ID | TAACAACATAGGAGCTGTGATTGGCTGTTTTCAGCCAATCAGCA |
| | NO: 4 | CTGACTCATTTGCATAGCCTTTACAAGCGGTCACAAACTCAAGA |
| | | AACGAGCGGTTTTAATAGTCTTTTAGAATATTGTTTATCGAACCG |
| | | AATAAGGAACTGTGCTTTGTGATTCACATATCAGTGGAGGGGTG |
| | | TGGAAATGGCACCTTGATAAGTCACCATGAGTGTAAAGGGAGTT |
| | | GATGTCCTTCCCTGGCTCGCTACAGACGCACTTCCGCGACCGCAC |
| | | CAGCACCGCGACGTGGAGGACGATGATACTCAGCAACAGGAGG |
| | | AGCCCACTGGCGGCAAGTTCTGCTCAGCGGAGTTTCTGCCCGGC |
| | | CAAACAGCGTGTGGAATTTTTGGAGCAGGTTTTCTGACTTCGGTC |
| | | GGAAAACCCCTCCCAATTTCACTGGTTTCAAAAACAGAAAAACA |
| | | GTTCTCTTCCCCGCTCCCCGGTGTGTGAGAGGGGCTTTGATCCTT |
| | | CTCTGGTTTCCTAGGAAACGCGTATGTG |
| PMP22 | SEQ ID | TAACAACATAGGAGCTGTGATTGGCTGTTTTCAGCCAATCAGCA |
| | NO: 5 | CTGACTCATGCAAATCAAGAGAAATGCAAATAGCCTTTACAAGC |
| | | GGTCACAAACTCAAGAAACGAGCGGTTTTAATAGTCTTTTAGAA |
| | | TATTGTTTATCGAACCGAATAAGGAACTGTGCTTTGTGATTCACA |
| | | TATCAGTGGAGGGGTGTGGAAATGGCACCTTGATAAGTCACCAT |
| | | GAGTGTAAAGGGAGTTGATGTCCTTCCCTGGCTCGCTACAGACG |
| | | CACTTCCGCGACCGCACCAGCACCGCGACGTGGAGGACGATGAT |
| | | ACTCAGCAACAGGAGGAGCCCACTGGCGGCAAGTTCTGCTCAGC |
| | | GGAGTTTCTGCCCGGCCAAACAGCGTGTGGAATTTTTGGAGCAG |
| | | GTTTTCTGACTTCGGTCGGAAAACCCCTCCCAATTTCACTGGTTT |
| | | CAAAAACAGAAAAACAGTTCTCTTCCCCGCTCCCCGGTGTGTGA |
| | | GAGGGGCTTTGATCCTTCTCTGGTTTCCTAGGAAACGCGTATGTG |
| SNCA | SEQ ID | TAACAACATAGGAGCTGTGATTGGCTGTTTTCAGCCAATCAGCA |
| | NO: 6 | CTGACTCATTTGCATAGCCTTTACAAGCGGTCACAAACTCAAGA |
| | | AACGAGCGGTTTTAATAGTCTTTTAGAATATTGTTTATCGAACCG |
| | | AATAAGGAACTGTGCTTTGTGATTCACATATCAGTGGAGGGGTG |
| | | TGGAAATGGCACCTTGATCTCACCCTCATCGAAAGTGGAGTTGA |
| | | TGTCCTTCCCTGGCTCGCTACAGACGCACTTCCGCGACCGGCCAC |
| | | AACTCCCTCCTTGGCCTTTGAAAGTCCTTTCATGAATACATCCAC |
| | | GGCTAATGAATTCCTTTACACCACACTGGAAAACATAAAATACA |
| | | CTTTGAGTGGAATTTTTGGAGCAGGTTTTCTGACTTCGGTCGGAA |
| | | AACCCCTCCCAATTTCACTGGTCTACAATGAAAGCAAAACAGTT |
| | | CTCTTCCCCGCTCCCCGGTGTGTGAGAGGGGCTTTGATCCTTCTC |
| | | TGGTTTCCTAGGAAACGCGTATGTG |
| SNCA | SEQ ID | TAAGGACCAGCTTCTTTGGGAGAGAACAGACGCAGGGGCGGGA |
| | NO: 7 | GGGAAAAAGGGAGAGGCAGACGTCACTTCCTCTTGGCGACTCTG |
| | | GCAGCAGATTGGTCGGTTGAGTGGCAGAAAGGCAGACGGGGAC |
| | | TGGGCAAGGCACTGTCGGTGACATCACGGACAGGGCGACTTCTA |
| | | TGTAGATGAGGCAGCGCAGAGGCTGCTGCTTCGCCACTTGCTGC |
| | | TTCGCCACGAAGGGAGTTCCCGTGCCCTGGGAGCGGGTTCAGGA |
| | | CCGCTGATCGGAAGTGAGAATCCCAGCTGTGTGTCAGGGCTGGA |
| | | AAGGGCTCGGGAGTGCGCGGGGCAAGTGACCGTGTGTGTAAAG |
| | | AGTGAGGCGTATGAGGCTGTGTCGGGGCAGAGCCCGAAGATCTC |
| | | ACCGGCCACAACTCCCTCCTTGGCCTTTGAAAGTCCTTTCATGAA |
| | | TACATCCACGGCTAATGAATTCCTTTACACCACACTGGAAAACA |
| | | TAAAATACACTTTGAGTGGAATTTTTGGAGCAGGTTTTCTGACTT |
| | | CGGTCGGAAAACCCCTCCCAATTTCACTGGTCTACAATGAAAGC |
| | | AAAACAGTTCTCTTCCCCGCTCCCCGGTGTGTGAGAGGGGCTTTG |
| | | ATCCTTCTCTGGTTTCCTAGGAAACGCGTATGTG |
| SNCA | SEQ ID | TTAACAACAACGAAGGGGCTGTGACTGGCTGCTTTCTCAACCAA |
| | NO: 8 | TCAGCACCGAACTCATTTGCATGGGCTGAGAACAAATGTTCGCG |
| | | AACTCTAGAAATGAATGACTTAAGTAAGTTCCTTAGAATATTATT |
| | | TTTCCTACTGAAAGTTACCACATGCGTCGTTGTTTATACAGTAAT |
| | | AGGAACAAGAAAAAAGTCACCTAAGCTCACCCTCATCAATTGTG |
| | | GAGTTCCTTTATATCCCATCTTCTCTCCAAACACATACGCAGACC |
| | | GGCCACAACTCCCTCCTTGGCCTTTGAAAGTCCTTTCATGAATAC |
| | | ATCCACGGCTAATGAATTCCTTTACACCACACTGGAAAACATAA |
| | | AATACACTTTGAGTGGAATTTTTGGAGCAGGTTTTCTGACTTCGG |
| | | TCGGAAAACCCCTCCCAATTTCACTGGTCTACAATGAAAGCAAA |
| | | ACAGTTCTCTTCCCCGCTCCCCGGTGTGTGAGAGGGGCTTTGATC |
| | | CTTCTCTGGTTTCCTAGGAAACGCGTATGTG |
| SNCA | SEQ ID | TAACAACATAGGAGCTGTGATTGGCTGTTTTCAGCCAATCAGCA |
| | NO: 9 | CTGACTCATTTGCATAGCCTTTACAAGCGGTCACAAACTCAAGA |
| | | AACGAGCGGTTTTAATAGTCTTTTAGAATATTGTTTATCGAACCG |
| | | AATAAGGAACTGTGCTTTGTGATTCACATATCAGTGGAGGGGTG |
| | | TGGAAATGGCACCTTGATAAGTCACCATGAGTGTAAAGGGAGTT |
| | | GATGTCCTTCCCTGGCTCGCTACAGACGCACTTCCGCGACCGGCC |
| | | ACAACTCCCTCCTTGGCCTTTGAAAGTCCTTTCATGAATACATCC |
| | | ACGGCTAATGAATTCCTTTACACCACACTGGAAAACATAAAATA |
| | | CACTTTGAGTGGAATTTTTGGAGCAGGTTTTCTGACTTCGGTCGG |
| | | AAAACCCCTCCCAATTTCACTGGTCTACAATGAAAGCAAAACAG |
| | | TTCTCTTCCCCGCTCCCCGGTGTGTGAGAGGGGCTTTGATCCTTC |
| | | TCTGGTTTCCTAGGAAACGCGTATGTG |
| SNCA | SEQ ID | TAACAACATAGGAGCTGTGATTGGCTGTTTTCAGCCAATCAGCA |
| | NO: 10 | CTGACTCATTTGCATAGCCTTTACAAGCGGTCACAAACTCAAGA |
| | | AACGAGCGGTTTTAATAGTCTTTTAGAATATTGTTTATCGAACCG |
| | | AATAAGGAACTGTGCTTTGTGATTCACATATCAGTGGAGGGGTG |
| | | TGGAAATGGCACCTTGATCTCACCCTCATCGAAAGTGGAGTTGA |
| | | TGTCCTTCCCTGGCTCGCTACAGACGCACTTCCGCGACCGGCCAC |
| | | AACTCCCTCCTTGGCCTTTGAAAGTCCTTTCATGAATACATCCAC |
| | | GGCTAATGAATTCCTTTACACCACACTGGAAAACATAAAATACA |
| | | CTTTGAGTGGAATTTTTGGAGCAGGTTTTCTGACTTCGGTCGGAA |
| | | AACCCCTCCCAATTTCACTGGTTTCAAAAACAGAAAAACAGTTC |
| | | TCGTTTCAAAAACAGATTCCCCGCTCCCCGGTGTGTGAGAGGGG |
| | | CTTTGATCCTTCTCTGGTTTCCTAGGAAACGCGTATGTG |
| SNCA | SEQ ID | TAACAACATAGGAGCTGTGATTGGCTGTTTTCAGCCAATCAGCA |
| | NO: 11 | CTGACTCATTTGCATAGCCTTTACAAGCGGTCACAAACTCAAGA |
| | | AACGAGCGGTTTTAATAGTCTTTTAGAATATTGTTTATCGAACCG |
| | | AATAAGGAACTGTGCTTTGTGATTCACATATCAGTGGAGGGGTG |
| | | TGGAAATGGCACCTTGATAAGTCACCATGAGTGTAAAGGGAGTT |
| | | GATGTCCTTCCCTGGCTCGCTACAGACGCACTTCCGCGACCGGCC |
| | | ACAACTCCCTCCTTGGCCTTTGAAAGTCCTTTCATGAATACATCC |
| | | ACGGCTAATGAATTCCTTTACACCACACTGGAAAACATAAAATA |
| | | CACTTTGAGTGGAATTTTTGGAGCAGGTTTTCTGACTTCGGTCGG |
| | | AAAACCCCTCCCAATTTCACTGGTTTCAAAAACAGAAAAACAGT |
| | | TCTCTTCCCCGCTCCCCGGTGTGTGAGAGGGGCTTTGATCCTTCT |
| | | CTGGTTTCCTAGGAAACGCGTATGTG |
| SNCA | SEQ ID | TAACAACATAGGAGCTGTGATTGGCTGTTTTCAGCCAATCAGCA |
| | NO: 12 | CTGACTCATGCAAATCAAGAGAAATGCAAATAGCCTTTACAAGC |
| | | GGTCACAAACTCAAGAAACGAGCGGTTTTAATAGTCTTTTAGAA |
| | | TATTGTTTATCGAACCGAATAAGGAACTGTGCTTTGTGATTCACA |
| | | TATCAGTGGAGGGGTGTGGAAATGGCACCTTGATAAGTCACCAT |
| | | GAGTGTAAAGGGAGTTGATGTCCTTCCCTGGCTCGCTACAGACG |
| | | CACTTCCGCGACCGGCCACAACTCCCTCCTTGGCCTTTGAAAGTC |
| | | CTTTCATGAATACATCCACGGCTAATGAATTCCTTTACACCACAC |
| | | TGGAAAACATAAAATACACTTTGAGTGGAATTTTTGGAGCAGGT |
| | | TTTCTGACTTCGGTCGGAAAACCCCTCCCAATTTCACTGGTTTCA |
| | | AAAACAGAAAAACAGTTCTCTTCCCCGCTCCCCGGTGTGTGAGA |
| | | GGGGCTTTGATCCTTCTCTGGTTTCCTAGGAAACGCGTATGTG |
| SERPINA1 | SEQ ID | TAACAACATAGGAGCTGTGATTGGCTGTTTTCAGCCAATCAGCA |
| | NO: 59 | CTGACTCATTTGCATAGCCTTTACAAGCGGTCACAAACTCAAGA |
| | | AACGAGCGGTTTTAATAGTCTTTTAGAATATTGTTTATCGAACCG |
| | | AATAAGGAACTGTGCTTTGTGATTCACATATCAGTGGAGGGGTG |
| | | TGGAAATGGCACCTTGATAAGTCACCATGAGTGTAAAGGGAGTT |
| | | GATGTCCTTCCCTGGCTCGCTACAGACGCACTTCCGCGACCGTAG |
| | | ACATGGGTATGGCCTCTAATTTGTAGGCCCCAGCAGCTTCAGTCC |
| | | CTTACTCGTCGTACCAGAGCACAGCCAGTCGTATGCACGGCGTG |
| | | GAATTTTTGGAGCAGGTTTTCTGACTTCGGTCGGAAAACCCCTCC |
| | | CAATTTCACTGGTTTCAAAAACAGAAAAACAGTTCTCTTCCCCGC |
| | | TCCCCGGTGTGTGAGAGGGGCTTTGATCCTTCTCTGGTTTCCTAG |
| | | GAAACGCGTATGTG |

[0285] In some embodiments, an engineered guide RNA expression cassette may have at least about 70%, at least about 75%, at least about 80%, at least about 83%, at least about 85%, at least about 87%, at least about 90%, at least about 91%, at least about 92%, at least about 93%, at least about 94%, at least about 95%, at least about 96% at least about 97%, at least about 98%, at least about 99%, or about 100% sequence identity to any of SEQ ID NO: 1-SEQ ID NO: 12 or SEQ ID NO: 59.

[0286] An engineered guide RNA expression cassette may comprise a promoter (e.g., any of SEQ ID NO: 13-SEQ ID NO: 17, SEQ ID NO: 167-SEQ ID NO: 707, SEQ ID NO: 1241, SEQ ID NO: 1248-SEQ ID NO: 1253, or SEQ ID NO: 1259-SEQ ID NO: 1263), a guide RNA sequence, a structural element, and a termination sequence (e.g., any of SEQ ID NO: 60, SEQ ID NO: 708-SEQ ID NO: 1240, SEQ ID NO: 1242, SEQ ID NO: 1243-SEQ ID NO: 1247, SEQ ID NO: 1254-SEQ ID NO: 1257, SEQ ID NO: 1264-SEQ ID NO: 1272, SEQ ID NO: 1275, or SEQ ID NO: 1287-SEQ ID NO: 1289).

[0287] For example, the engineered guide RNA expression cassette of SEQ ID NO: 1 comprises a promoter of SEQ ID NO: 15, a PMP22 guide RNA sequence of SEQ ID NO: 1273, and a termination sequence of SEQ ID NO: 1243. For example, the engineered guide RNA expression cassette of SEQ ID NO: 2 comprises a promoter of SEQ ID NO: 16, a PMP22 guide RNA sequence of SEQ ID NO: 1273, and a termination sequence of SEQ ID NO: 1243. For example, the engineered guide RNA expression cassette of SEQ ID NO: 3 comprises a promoter of SEQ ID NO: 15, a PMP22 guide RNA sequence of SEQ ID NO: 1273, and a termination sequence of SEQ ID NO: 1275. For example, the engineered guide RNA expression cassette of SEQ ID NO: 4 comprises a promoter of SEQ ID NO: 16, a PMP22 guide RNA sequence of SEQ ID NO: 1273, and a termination sequence of SEQ ID NO: 60. For example, the engineered guide RNA expression cassette of SEQ ID NO: 5 comprises a promoter of SEQ ID NO: 17, a PMP22 guide RNA sequence of SEQ ID NO: 1273, and a termination sequence of SEQ ID NO: 60.

[0288] For example, the engineered guide RNA expression cassette of SEQ ID NO: 6 comprises a promoter of SEQ ID NO: 15, a SNCA guide RNA sequence of SEQ ID NO: 1274, and a termination sequence of SEQ ID NO: 1243. For example, the engineered guide RNA expression cassette of SEQ ID NO: 7 comprises a promoter of SEQ ID NO: 13, a SNCA guide RNA sequence of SEQ ID NO: 1290, and a termination sequence of SEQ ID NO: 1243. For example, the engineered guide RNA expression cassette of SEQ ID NO: 8 comprises a promoter of SEQ ID NO: 14, a SNCA guide RNA sequence of SEQ ID NO: 1274, and a termination sequence of SEQ ID NO: 1243. For example, the engineered guide RNA expression cassette of SEQ ID NO: 9 comprises a promoter of SEQ ID NO: 16, a SNCA guide RNA sequence of SEQ ID NO: 1274, and a termination sequence of SEQ ID NO: 1243. For example, the engineered guide RNA expression cassette of SEQ ID NO: 10 comprises a promoter of SEQ ID NO: 15, a SNCA guide RNA sequence of SEQ ID NO: 1274, and a termination sequence of SEQ ID NO: 1275. For example, the engineered guide RNA expression cassette of SEQ ID NO: 11 comprises a promoter of SEQ ID NO: 16, a SNCA guide RNA sequence of SEQ ID NO: 1274, and a termination sequence of SEQ ID NO: 60. For example, the engineered guide RNA expression cassette of SEQ ID NO: 12 comprises a promoter of SEQ ID NO: 17, a SNCA guide RNA sequence of SEQ ID NO: 1274, and a termination sequence of SEQ ID NO: 60.

[0289] For example, the engineered guide RNA expression cassette of SEQ ID NO: 59 comprises a promoter of SEQ ID NO: 16, a SERPINA 1 guide RNA sequence of SEQ ID NO: 61, and a termination sequence of SEQ ID NO: 60.

### Additional Engineered Guide RNA Components

[0290] The present disclosure provides for engineered guide RNAs with additional structural features and components. For example, an engineered guide RNA described herein can be circular. In another example, an engineered guide RNA described herein can comprise a U7, an SmOPT sequence, or a combination of both sequences.

[0291] In some cases, an engineered guide RNA can be circularized. In some cases, an engineered guide RNA provided herein can be circularized or in a circular configuration. In some aspects, an at least partially circular guide RNA lacks a 5′ hydroxyl or a 3′ hydroxyl.

[0292] In some examples, an engineered guide RNA can comprise a backbone comprising a plurality of sugar and phosphate moieties covalently linked together. In some examples, a backbone of an engineered guide RNA can comprise a phosphodiester bond linkage between a first hydroxyl group in a phosphate group on a 5′ carbon of a deoxyribose in DNA or ribose in RNA and a second hydroxyl group on a 3′ carbon of a deoxyribose in DNA or ribose in RNA.

[0293] In some embodiments, a backbone of an engineered guide RNA can lack a 5′ reducing hydroxyl, a 3′ reducing hydroxyl, or both, capable of being exposed to a solvent. In some embodiments, a backbone of an engineered guide can lack a 5′ reducing hydroxyl, a 3′ reducing hydroxyl, or both, capable of being exposed to nucleases. In some embodiments, a backbone of an engineered guide can lack a 5′ reducing hydroxyl, a 3′ reducing hydroxyl, or both, capable of being exposed to hydrolytic enzymes. In some instances, a backbone of an engineered guide can be represented as a polynucleotide sequence in a circular 2-dimensional format with one nucleotide after the other. In some instances, a backbone of an engineered guide can be represented as a polynucleotide sequence in a looped 2-dimensional format with one nucleotide after the other. In some cases, a 5′ hydroxyl, a 3′ hydroxyl, or both, can be joined through a phosphorus-oxygen bond. In some cases, a 5′ hydroxyl, a 3′ hydroxyl, or both, can be modified into a phosphoester with a phosphorus-containing moiety.

[0294] As described herein, an engineered guide can comprise a circular structure. An engineered polynucleotide can be circularized from a precursor engineered polynucleotide. Such a precursor engineered polynucleotide can be a precursor engineered linear polynucleotide. In some cases, a precursor engineered linear polynucleotide can be a precursor for a circular engineered guide RNA. For example, a precursor engineered linear polynucleotide can be a linear mRNA transcribed from a plasmid, which can be configured to circularize within a cell using the techniques described herein. A precursor engineered linear polynucleotide can be constructed with domains such as a ribozyme domain and a ligation domain that allow for circularization when inserted into a cell. A ribozyme domain can include a domain that is capable of cleaving the linear precursor RNA at specific sites (e.g., adjacent to the ligation domain). A precursor engineered linear polynucleotide can comprise, from 5′ to 3′: a 5′ ribozyme domain, a 5′ ligation domain, a circularized region, a 3′ ligation domain, and a 3′ ribozyme domain. In some cases, a circularized region can comprise a guide RNA described herein. In some cases, the precursor polynucleotide can be specifically processed at both sites by the 5′ and the 3′ ribozymes, respectively, to free exposed ends on the 5′ and 3′ ligation domains. The free exposed ends can be ligation competent, such that the ends can be ligated to form a mature circularized structure. For instance, the free ends can include a 5′-OH and a 2′, 3′-cyclic phosphate that are ligated via RNA ligation in the cell. The linear polynucleotide with the ligation and ribozyme domains can be transfected into a cell where it can circularize via endogenous cellular enzymes. In some cases, a polynucleotide can encode an engineered guide RNA comprising the ribozyme and ligation domains described herein, which can circularize within a cell. For example, PCT/US2021/034301 provides a description of circular guide RNAs and their structures, sequences of circular guide RNAs, and methods of engineering circularized polynucleotide domains, and each of these descriptions in PCT/US2021/034301 is herein incorporated by reference.

[0295] An engineered polynucleotide as described herein (e.g., a circularized guide RNA) can include spacer domains. As described herein, a spacer domain can refer to a domain that provides space between other domains. A spacer domain can be used to between a region to be circularized and flanking ligation sequences to increase the overall size of the mature circularized guide RNA. Where the region to be circularized includes a targeting domain as described herein that is configured to associate to a target sequence, the addition of spacers can provide improvements (e.g., increased specificity, enhanced editing efficiency, etc.) for the engineered polynucleotide to the target polynucleotide, relative to a comparable engineered polynucleotide that lacks a spacer domain. In some instances, the spacer domain is configured to not hybridize with the target RNA. In some embodiments, a precursor engineered polynucleotide or a circular engineered guide, can comprise, in order of 5′ to 3′: a first ribozyme domain; a first ligation domain; a first spacer domain; a targeting domain that can be at least partially complementary to a target RNA, a second spacer domain, a second ligation domain, and a second ribozyme domain. In some cases, the first spacer domain, the second spacer domain, or both are configured to not bind to the target RNA when the targeting domain binds to the target RNA.

[0296] The compositions and methods of the present disclosure provide engineered polynucleotides encoding for guide RNAs that are operably linked to a portion of a small nuclear ribonucleic acid (snRNA) sequence. The engineered polynucleotide can include at least a portion of a small nuclear ribonucleic acid (snRNA) sequence. The U7 and U1 small nuclear RNAs, whose natural role is in spliceosomal processing of pre-mRNA, have for decades been re-engineered to alter splicing at desired disease targets. Replacing a portion of the U7 snRNA which naturally hybridizes to the spacer element of histone pre-mRNA (e.g., the first 18 nucleotides of the U7 snRNA) with a short targeting (or antisense) sequence of a disease gene, may redirect the splicing machinery to alter splicing around that target site. Furthermore, converting the wild type U7 Sm-domain binding site to an optimized consensus Sm-binding sequence (SmOPT) can increase the expression level, activity, and subcellular localization of the artificial antisense-engineered U7 snRNA. Many subsequent groups have adapted this modified U7 SmOPT snRNA chassis with antisense sequences of other genes to recruit spliceosomal elements and modify RNA splicing for additional disease targets.

[0297] An snRNA is a class of small RNA molecules found within the nucleus of eukaryotic cells. They are involved in a variety of important processes such as RNA splicing (removal of introns from pre-mRNA), regulation of transcription factors (7SK RNA) or RNA polymerase II (B2 RNA), and maintaining the telomeres. They are always associated with specific proteins, and the resulting RNA-protein complexes are referred to as small nuclear ribonucleoproteins (snRNP) or sometimes as snurps. There are many snRNAs, which are denominated U1, U2, U3, U4, U5, U6, U7, U8, U9, and U10.

[0298] The snRNA of the U7 type is normally involved in the maturation of histone mRNA. This snRNA has been identified in a great number of eukaryotic species (56 so far) and the U7 snRNA of each of these species should be regarded as equally convenient for this disclosure.

[0299] Wild type U7 snRNA includes a stem-loop structure, the U7-specific Sm sequence, and a sequence antisense to the 3′ end of histone pre-mRNA.

[0300] In addition to the SmOPT domain, U7 comprises a sequence antisense to the 3′ end of histone pre-mRNA. When this sequence is replaced by a targeting sequence that is antisense to another target pre-mRNA, U7 is redirected to the new target pre-mRNA. Accordingly, the stable expression of modified U7 snRNAs containing the SmOPT domain and a targeting antisense sequence has resulted in specific alteration of mRNA splicing. While AAV-2/1 based vectors expressing an appropriately modified murine U7 gene along with its natural promoter and 3′ elements have enabled high efficiency gene transfer into the skeletal muscle and complete dystrophin rescue by covering and skipping mouse Dmd exon 23, the engineered polynucleotides as described herein (whether directly administered or administered via, for example, AAV vectors) can facilitate editing of target RNA by a deaminase.

[0301] The engineered polynucleotide can comprise at least in part an snRNA sequence. The snRNA sequence can be U1, U2, U3, U4, U5, U6, U7, U8, U9, or a U10 snRNA sequence.

[0302] In some instances, an engineered polynucleotide that comprises at least a portion of an snRNA sequence (e.g., an snRNA promoter, an snRNA hairpin, and the like) can have superior properties for treating or preventing a disease or condition, relative to a comparable polynucleotide lacking such features. For example, as described herein an engineered polynucleotide that comprises at least a portion of an snRNA sequence can facilitate exon skipping of an exon at a greater efficiency than a comparable polynucleotide lacking such features. Further, as described herein an engineered polynucleotide that comprises at least a portion of an snRNA sequence can facilitate an editing of a base of a nucleotide in a target RNA (e.g., a pre-mRNA or a mature RNA) at a greater efficiency than a comparable polynucleotide lacking such features. Promoters and snRNA components are described in PCT/US2021/028618 and PCT/US2022/078801, and each of these descriptions in PCT/US2021/028618 and PCT/US2022/078801 are herein incorporated by reference.

[0303] Disclosed herein are engineered RNAs comprising (a) an engineered guide RNA as described herein, and (b) a U7 snRNA hairpin sequence, a SmOPT sequence, or a combination thereof. In some embodiments, the U7 hairpin comprises a human U7 Hairpin sequence, or a mouse U7 hairpin sequence. In some cases, a human U7 hairpin sequence comprises TAGGCTTTCTGGCTTTTTACCGGAAAGCCCCT (SEQ ID NO: 52) or RNA: UAGGCUUUCUGGCUUUUUACCGGAAAGCCCCU (SEQ ID NO: 53). In some cases, a mouse U7 hairpin sequence comprises CAGGTTTTCTGACTTCGGTCGGAAAACCCCT (SEQ ID NO: 54) or RNA: CAGGUUUUCUGACUUCGGUCGGAAAACCCCU (SEQ ID NO: 55). In some embodiments, the SmOPT sequence has a sequence of AATTTTTGGAG (SEQ ID NO: 56) or RNA: AAUUUUUGGAG (SEQ ID NO: 57). In some embodiments, an RNA payload may comprise a guide RNA, a U7 hairpin sequence (e.g., a human or a mouse U7 hairpin sequence), an SmOPT sequence, or a combination thereof. For example, an RNA payload may comprise a sequence of AATTTTTGGAGCAGGTTTTCTGACTTCGGTCGGAAAACCCCTCCCAATTTCACTGGT CTACAATGAAAGCAAAACAGTTCTCTTCCCCGCTCCCCGGTGTGTGAGAGGGGCTTT GATCCTTCTCTGGTTTCCTAGGAAACGCGTATGTG (SEQ ID NO: 58). In some cases, a combination of a U7 hairpin sequence and a SmOPT sequence can comprise a SmOPT U7 hairpin sequence, wherein the SmOPT sequence is linked to the U7 sequence. In some cases, a U7 hairpin sequence, an SmOPT sequence, or a combination thereof is downstream (e.g., 3′) of the engineered guide RNA disclosed herein.

### Guide RNA Payloads for DNA Editing

[0304] The expression cassettes described herein may be used to enhance expression of RNA components for site-specific, selective editing of a target DNA via a DNA editing entity or a biologically active fragment thereof. An RNA component for site-specific DNA editing may comprise a guide RNA, a transactivating CRISPR RNA (tracrRNA), a single guide RNA, or engineered polynucleotides encoding the same. An engineered guide RNA, as described herein, may comprise a sequence with complementarity to a target DNA described herein. As such, a guide RNA can be engineered to site-specifically/selectively target and hybridize to a particular target DNA, thus facilitating editing of specific nucleotide in the target DNA via a DNA editing entity or a biologically active fragment thereof. DNA editing may be facilitated by a nuclease, such as a Cas nuclease. In some embodiments, the Cas nuclease may be a Cas9, a Cas12, or a Cas14.

[0305] In some embodiments, an engineered guide RNA hybridizes to a sequence of the target DNA. In some embodiments, part of the engineered guide RNA hybridizes to the sequence of the target DNA. The part of the engineered guide RNA that hybridizes to the target DNA is of sufficient complementary to the sequence of the target DNA for hybridization to occur. In some embodiments, the guide RNA may comprise a sequence having at least about 95%, at least about 96%, at least about 97%, at least about 98%, at least about 99%, or about 100% sequence complementarity to a target DNA. A guide RNA encoded by an expression cassette of the present disclosure may comprise a length of from about 15 to about 70 nucleotides, from about 40 to about 70 nucleotides, or from about 70 to about 100 nucleotides. In some embodiments, the region of the guide RNA that hybridizes to the target may comprise a length of from about 18 to about 44 nucleotides.

[0306] In some examples, an engineered guide RNA can facilitate editing of a base of a nucleotide of in a target sequence of a target DNA that results in modulating the expression of a gene encoded by the target DNA. In some instances, modulation can be increased or decrease expression of the gene. In some cases, an engineered guide can be configured to facilitate an editing of a base of a nucleotide or polynucleotide of a region of an DNA by a DNA editing entity (e.g., a Cas nuclease).

[0307] In some embodiments, the expression cassettes described herein may be used to enhance expression of transactivating crRNAs (tracrRNAs) and engineered polynucleotides encoding the same for editing of a target DNA via a DNA editing entity or a biologically active fragment thereof. The tracrRNA may bind to and activate a DNA editing enzyme (e.g., a Cas nuclease). A tracrRNA encoded by an expression cassette of the present disclosure may comprise a length of from about 75 to about 100 nucleotides.

[0308] In some embodiments, the expression cassettes described herein may be used to enhance expression of a single guide RNA and engineered polynucleotides encoding the same for editing of a target DNA via a DNA editing entity or a biologically active fragment thereof. The single guide RNA may comprise a region that binds to and activates a DNA editing enzyme (e.g., a Cas nuclease) and a region that hybridizes to the sequence of the target DNA. The part of the single guide RNA that hybridizes to the target DNA is of sufficient complementary to the sequence of the target DNA for hybridization to occur. In some embodiments, the single guide RNA may comprise a sequence having at least about 95%, at least about 96%, at least about 97%, at least about 98%, at least about 99%, or about 100% sequence complementarity to a target DNA. A single guide RNA encoded by an expression cassette of the present disclosure may comprise a length of from about 80 to about 120 nucleotides. In some embodiments, the region of the single guide RNA that hybridizes to the target may comprise a length of from about 18 to about 44 nucleotides.

### Other RNA-Targeting Oligonucleotides

[0309] The expression cassettes described herein may be used to enhance expression of other engineered RNA-targeting oligonucleotides, including antisense oligonucleotides, siRNAs, shRNAs, and miRNAs, and engineered polynucleotides encoding the same that hybridizes to a target RNA (e.g., a target mRNA or a target pre-mRNA). An engineered oligonucleotide, as described herein, may comprise a targeting domain with complementarity to a target RNA described herein. As such, an oligonucleotide can be engineered to target and hybridize to a particular target RNA, thus altering expression of a polypeptide encoded by the target RNA.

[0310] In some embodiments, the engineered oligonucleotide (e.g., antisense oligonucleotide, siRNA, shRNA, or miRNA) of the present disclosure hybridizes to a sequence of the target RNA. In some embodiments, part of the engineered oligonucleotide (e.g., a targeting domain) hybridizes to the sequence of the target RNA. The part of the engineered oligonucleotide that hybridizes to the target RNA is of sufficient complementary to the sequence of the target RNA for hybridization to occur. A targeting sequence can also be referred to as a “targeting domain” or a “targeting region.” In some embodiments, binding of the engineered oligonucleotide to the target RNA may recruit additional components, such as RISC components.

### Therapeutic Applications

[0311] The expression cassettes of the present disclosure encoding an RNA payload under transcriptional control of an engineered promoter may have a variety of therapeutic applications. The engineered promoters described herein may facilitate the therapeutic use by increasing payload expression and enhancing a therapeutic effect produced by the payload. For example, increased guide RNA payload expression may enhance editing efficiency of a target DNA or RNA. In another example, increased antisense oligonucleotide expression may enhance target knockdown efficiency.

### RNA Editing

[0312] RNA editing can refer to a process by which RNA can be enzymatically modified post synthesis at specific nucleosides. RNA editing can comprise any one of an insertion, deletion, or substitution of a nucleotide(s). Examples of RNA editing include chemical modifications, such as pseudouridylation (the isomerization of uridine residues) and deamination (removal of an amine group from: cytidine to give rise to uridine, or C-to-U editing; or from adenosine to inosine, or A-to-I editing). RNA editing can be used to correct mutations (e.g., correction of a missense mutation) to restore protein expression, or to introduce mutations or edit coding or non-coding regions of RNA to inhibit RNA translation and effect protein knockdown. An expression cassette of the present disclosure may be used to express an engineered guide RNA to facilitate RNA editing by an RNA entity (e.g., an adenosine Deaminase Acting on RNA (ADAR)) or biologically active fragments thereof.

[0313] Described herein are engineered guide RNAs that facilitate RNA editing by an RNA editing entity (e.g., an adenosine Deaminase Acting on RNA (ADAR)) or biologically active fragments thereof. In some instances, ADARs can be enzymes that catalyze the chemical conversion of adenosines to inosines in RNA. Because the properties of inosine mimic those of guanosine (inosine will form two hydrogen bonds with cytosine, for example), inosine can be recognized as guanosine by the translational cellular machinery. “Adenosine-to-inosine (A-to-I) RNA editing”, therefore, effectively changes the primary sequence of RNA targets. In general, ADAR enzymes share a common domain architecture comprising a variable number of amino-terminal dsRNA binding domains (dsRBDs) and a single carboxy-terminal catalytic deaminase domain. Human ADARs possess two or three dsRBDs. Evidence suggests that ADARs can form homodimer as well as heterodimer with other ADARs when bound to double-stranded RNA, however it can be currently inconclusive if dimerization is needed for editing to occur. The engineered guide RNAs disclosed herein can facilitate RNA editing by any of or any combination of the three human ADAR genes that have been identified (ADARs 1-3). ADARs have a typical modular domain organization that includes at least two copies of a dsRNA binding domain (dsRBD; ADAR1 with three dsRBDs; ADAR2 and ADAR3 each with two dsRBDs) in their N-terminal region followed by a C-terminal deaminase domain.

[0314] The engineered guide RNAs of the present disclosure facilitate RNA editing by endogenous ADAR enzymes. In some embodiments, exogenous ADAR can be delivered alongside the engineered guide RNAs disclosed herein to facilitate RNA editing. In some embodiments, the ADAR is human ADAR1. In some embodiments, the ADAR is human ADAR2. In some embodiments, the ADAR is human ADAR3. In some embodiments, the ADAR is human ADAR1, human ADAR2, human ADAR2, or any combination thereof.

[0315] The present disclosure, in some embodiments, provides engineered guide RNAs that facilitate edits at particular regions in a target RNA (e.g., mRNA or pre-mRNA). For example, the engineered guide RNAs disclosed herein can target a coding sequence or a non-coding sequence of an RNA. For example, a target region in a coding sequence of an RNA can be a translation initiation site (TIS). In some embodiments, the target region in a non-coding sequence of an RNA can be a polyadenylation (polyA) signal sequence.

[0316] Missense Mutations. In some embodiments, the engineered guide RNAs of the present disclosure may target a missense mutation in a target RNA sequence. The engineered guide RNAs may facilitate ADAR-mediated RNA editing of a target adenosine (A) to convert to an inosine (I), which may be read as a guanosine (G). Conversion of A to I via ADAR-mediated RNA editing may correct G to A missense mutations. For example, ADAR-mediated editing may correct a valine to isoleucine or valine to methionine mutation by converting an isoleucine codon (AUU, AUC, or AUA) or methionine codon (AUG) to a valine codon (AUA, GUC, GUU, or GUG). In another example, ADAR-mediated editing may correct a cysteine to tyrosine or mutation by converting a tyrosine codon (AUA or UAC) to a cysteine codon (UGU or UGC). Alternatively, or in addition, the engineered guide RNAs may facilitate APOBEC-mediated RNA editing of a target cytosine (C) to convert to a uracil (U). Conversion of C to U via APOBEC-mediated RNA editing may correct U to C missense mutations. Engineered guide RNAs of the present disclosure can target one or any combination of missense mutations of a target sequence (e.g., SNCA, PMP22, DUX4, LRRK2, MAPT, GRN, ABCA4, APP, SERPINA1, HEXA, CFTR, LIPA, GBA, PINK1, or MECP2).

[0317] Nonsense Mutations. In some embodiments, the engineered guide RNAs of the present disclosure may target a nonsense mutation in a target RNA sequence. The engineered guide RNAs may facilitate ADAR-mediated RNA editing of a target adenosine (A) to convert to an inosine (I), which may be read as a guanosine (G). Conversion of A to I via ADAR-mediated RNA editing may correct G to A nonsense mutations. For example, ADAR-mediated editing may correct a tryptophan to stop nonsense mutation by converting a UAG stop codon to a tryptophan codon (UGG). In another example, ADAR-mediated editing may correct a tryptophan to stop nonsense mutation by converting a UGA stop codon to a tryptophan codon (UGG). Correction of nonsense mutations via ADAR-mediated editing may increase expression of the target sequence. Engineered guide RNAs of the present disclosure can target one or any combination of missense mutations of a target sequence (e.g., SNCA, PMP22, DUX4, LRRK2, MAPT, GRN, ABCA4, APP, SERPINA1, HEXA, CFTR, LIPA, GBA, PINK1, or MECP2).

[0318] TIS. In some embodiments, the engineered guide RNAs of the present disclosure target the adenosine at a translation initiation site (TIS). The engineered guide RNAs may facilitate ADAR-mediated RNA editing of the TIS (AUG) to GUG. This results in inhibition of RNA translation and, thereby, protein knockdown. Protein knockdown can also be referred to as reduced expression of wild type protein. Engineered guide RNAs of the present disclosure can target one or any combination of the TISs of a target sequence (e.g., SNCA, PMP22, DUX4, LRRK2, MAPT, GRN, ABCA4, APP, SERPINA1, HEXA, CFTR, LIPA, GBA, PINK1, or MECP2).

[0319] 3′UTR. In some embodiments, the engineered guide RNAs of the present disclosure target one or more adenosines in the 3′ untranslated region (3′UTR). In some embodiments, an engineered guide RNA facilitates ADAR-mediated RNA editing of the one or more adenosines in the 3′UTR, thereby reducing mRNA export from the nucleus and inhibiting translation, thereby resulting protein knockdown. In some embodiments, the target sequence may be SNCA, PMP22, DUX4, LRRK2, MAPT, GRN, ABCA4, APP, SERPINA1, HEXA, CFTR, LIPA, GBA, PINK1, or MECP2.

[0320] PolyA Signal Sequence. In some embodiments, the engineered guide RNAs of the present disclosure target one or more adenosines in the polyA signal sequence. In some embodiments, an engineered guide RNA facilitates ADAR-mediated RNA editing of the one or more adenosines in the polyA signal sequence, thereby resulting in disruption of RNA processing and degradation of the target mRNA and, thereby, protein knockdown. In some embodiments, a target can have one or more polyA signal sequences. In these instances, one or more engineered guide RNAs, varying in their respective sequences, of the present disclosure can be multiplexed to target adenosines in the one or more polyA signal sequences. In both cases, the engineered guide RNAs of the present disclosure facilitated ADAR-mediated RNA editing of adenosines to inosines (read as guanosines by cellular machinery) in the polyA signal sequence, resulting in protein knockdown. In some embodiments, the target sequence may be SNCA, PMP22, DUX4, LRRK2, MAPT, GRN, ABCA4, APP, SERPINA1, HEXA, CFTR, LIPA, GBA, PINK1, or MECP2.

### DNA Editing

[0321] DNA editing can refer to a process by which DNA can be enzymatically (e.g., by an RNA-guided endonuclease). DNA editing can comprise any one of an insertion, deletion, or substitution of a nucleotide(s). DNA editing can be used to correct mutations (e.g., correction of a missense mutation) to restore protein expression, or to introduce mutations or edit coding or non-coding regions of DNA to inhibit DNA transcription and effect protein knockdown. An expression cassette of the present disclosure may be used to express an engineered guide RNA to facilitate DNA editing by a DNA entity (e.g., CRISPR/Cas endonuclease) or biologically active fragments thereof. Described herein are engineered guide RNAs that facilitate DNA editing by a DNA editing entity (e.g., CRISPR/Cas endonuclease) or biologically active fragments thereof.

[0322] The engineered guide RNAs of the present disclosure may facilitate DNA editing by endogenous Cas enzymes. In some embodiments, exogenous Cas enzymes can be delivered alongside the engineered guide RNAs disclosed herein to facilitate DNA editing. In some embodiments, the Cas nuclease is Cas9. In some embodiments, the Cas nuclease is Cas12. In some embodiments, the Cas nuclease is Cas14.

[0323] The present disclosure, in some embodiments, provides engineered guide RNAs that facilitate edits at particular regions in a target DNA. For example, the engineered guide RNAs disclosed herein can target a coding sequence or a non-coding sequence of a DNA.

[0324] An engineered guide RNA of the present disclosure may recruit a CRISPR/Cas endonuclease (e.g., a Cas9 nuclease) to form a ribonucleoprotein (RNP) complex that is targeted to a particular site in a target polynucleotide (e.g., a target DNA) via base pairing between the guide RNA and a target region within the target polynucleotide. The engineered guide RNA may include a targeting sequence that is complementary to a target site of the target polynucleotide. Thus, an engineered guide RNA forms a complex with a Cas nuclease, and the guide RNA provides sequence specificity to the RNP complex via the targeting sequence. Upon recruitment to the target polynucleotide, the Cas nuclease may site-specifically edit the target polynucleotide (e.g., the target DNA). In some embodiments, the target polynucleotide may encode SNCA, PMP22, DUX4, LRRK2, MAPT, GRN, ABCA4, APP, SERPINA1, HEXA, CFTR, LIPA, GBA, PINK1, or MECP2.

### Expression Knockdown

[0325] An expression cassette of the present disclosure may be used to express an engineered RNA-targeting oligonucleotide (e.g., an antisense oligonucleotide, an siRNA, an shRNA, or a miRNA) to facilitate knockdown expression of the target RNA. In some embodiments, binding of the RNA-targeting oligonucleotide to the target RNA may recruit additional components (e.g., RISC complex components) to the target RNA that may reduce expression of a peptide encoded by the target RNA. For example, binding of an siRNA may recruit RISC and facilitate cleavage of the target RNA. In another example, binding of a miRNA or an shRNA may recruit RISC and inhibit translation of the target RNA. In some embodiments, the target RNA may encode SNCA, PMP22, DUX4, LRRK2, MAPT, GRN, ABCA4, APP, SERPINA1, HEXA, CFTR, LIPA, GBA, PINK1, or MECP2.

### Targets and Methods of Treatment

[0326] A small RNA payload, such as an engineered guide RNA, of the present disclosure can be used in a method of treating a disorder in a subject in need thereof. A disorder can be a disease, a condition, a genotype, a phenotype, or any state associated with an adverse effect. In some embodiments, treating a disorder can comprise preventing, slowing progression of, reversing, or alleviating symptoms of the disorder. A method of treating a disorder can comprise delivering an engineered polynucleotide encoding an engineered guide RNA to a cell of a subject in need thereof and expressing the engineered guide RNA in the cell. In some embodiments, an engineered guide RNA of the present disclosure can be used to treat a genetic disorder (e.g., a Tauopathy such as AD, FTD, Parkinson's disease). In some embodiments, an engineered guide RNA of the present disclosure can be used to treat a condition associated with one or more mutations.

[0327] The present disclosure provides for compositions of expression cassettes encoding engineered payloads (e.g., engineered guide RNAs) and methods of use thereof, such as methods of treatment. In some embodiments, the expression cassettes of the present disclosure encode guide RNAs targeting a coding sequence of an RNA (e.g., e.g., an RNA encoding α-synuclein, PMP22, DUX4, LRRK2, tau, progranulin, ABCA4, amyloid precursor protein, or alpha-1 antitrypsin). In some embodiments, the engineered polynucleotides of the present disclosure encode guide RNAs targeting a non-coding sequence of an RNA (e.g., a polyA sequence). In some embodiments, the present disclosure provides compositions of one or more than one engineered polynucleotide encoding more than one engineered guide RNAs targeting the TIS, the polyA sequence, or any other part of a coding sequence or non-coding sequence. The engineered guide RNAs disclosed herein facilitate ADAR-mediated RNA editing of adenosines in the TIS, the polyA sequence, any part of a coding sequence of an RNA, any part of a non-coding sequence of an RNA, or any combination thereof.

[0328] Examples of target genes that may be targeted by engineered RNA payloads encoded by the expression cassettes of the present disclosure are provided in TABLE 10. The target gene may be a wild type gene, or the target gene may be a mutated gene. Targeting the gene using an engineered RNA payload may treat a condition associated with the target gene.

TABLE 10
Exemplary Gene Targets and Associated Conditions

| Target Gene (Protein) | Associated Conditions |
|---|---|
| SNCA (α-synuclein) | Synucleinopathies, Parkinson's disease, Lewy |
| | body dementia, multiple system atrophy |
| PMP22 (peripheral myelin protein 22) | Charcot-Marie-Tooth disease, Hereditary |
| | neuropathy with liability to pressure palsies, Yuan- |
| | Harel-Lupski syndrome |
| MAPT (Tau) | Tauopathies, Alzheimer's disease frontotemporal |
| | dementia, Parkinson's disease, progressive |
| | supranuclear palsy, corticobasal degeneration, |
| | chronic traumatic encephalopathy, autism, |
| | traumatic brain injury, Dravet syndrome |
| LRRK2 (leucine rich repeat kinase 2) | Parkinson's disease, Crohn's disease |
| DUX4 (double homeobox 4) | Muscular dystrophy, B-cell leukemia |
| CMT1A (duplication of PMP22 | Charcot-Marie-Tooth disease, Dejerine-Sottas |
| associated with Charcot-Marie-Tooth | disease, hereditary neuropathy with liability to |
| disease type 1A) | pressure palsy |
| GRN (progranulin) | Frontotemporal dementia |
| ABCA4 (ATP-binding cassette sub- | Stargardt disease |
| family A member 4) | |
| APP (amyloid precursor protein) | Alzheimer's disease |
| SERPINA1 (alpha-1 antitrypsin) | Alpha-1 antitrypsin deficiency |
| HEXA (hexosaminidase A) | Tay-Sachs disease |
| CFTR (cystic fibrosis transmembrane | Cystic fibrosis |
| conductance regulator) | |
| LIPA (lipase A) | Liposomal acid lipase deficiency |
| GBA (glucosylceramidase beta) | Gaucher disease, Parkinson's disease |
| PINK1 (PTEN-induced kinase 1) | Parkinson's disease |
| MECP2 (methyl CpG binding protein 2) | Rett syndrome |

[0329] The expression cassettes of the present disclosure may express payloads to target, modify, and/or express any sequence of interest. Select targets of interest that may be targeted by the payloads described herein for treatment of an associated condition are discussed below by way of example.

### MAPT

[0330] The present disclosure provides for expression cassettes encoding engineered guide RNAs that facilitate RNA editing MAPT to knockdown expression of Tau protein. Tau pathology can be a key driver of a broad spectrum of neurodegenerative diseases, collectively known as Tauopathies. For example, diseases where Tau can play a primary role include, but are not limited to, Alzheimer's disease (AD), frontotemporal dementia (FTD), Parkinson's disease, progressive supranuclear palsy (PSP), corticobasal degeneration (CBD), and chronic traumatic encephalopathy. Tauopathies are characterized by the intracellular accumulation of neurofibrillary tangles (NFTs) composed of aggregated, misfolded Tau (MAPT gene). Thus, engineered guide RNAs of the present disclosure targeting MAPT RNA for ADAR-mediated editing to knockdown Tau protein can be capable of preventing or ameliorating disease progression in a number of diseases, including, but not limited to, AD, FTD, autism, traumatic brain injury, Parkinson's disease, and Dravet syndrome.

[0331] Thus, the engineered guide RNAs of the present disclosure can target MAPT for RNA editing, thereby, driving a reduction in Tau protein expression. In some embodiments, Tau protein expression is reduced in human neurons. In some embodiments, the present disclosure provides compositions of engineered guide RNAs that target MAPT and facilitated ADAR-mediated RNA editing of MAPT to reduce pathogenic levels of Tau by targeting key adenosines for deamination that are present in the translational initiation sites (TISs). In some embodiments, the engineered guide RNAs of the present disclosure target a coding sequence in MAPT. For example, the coding sequence can be a translation initiation site (TIS) (AUG) of MAPT, and the engineered guide RNA can facilitate ADAR-mediated RNA editing of AUG to GUG. Engineered guide RNAs of the present disclosure can target one or more of the TISs in MAPT to reduce or completely inhibit Tau protein expression.

[0332] For example, in some embodiments, an engineered guide RNA targets the AUG at the 18^{th} nucleotide in Exon 1 (c.1, Nm_005910.5; GRCh37/Hg19; also referred to as “c.1” for coding nucleotide 1), referred to as the conventional TIS. In some embodiments, an engineered guide RNA targets the AUG at the 48^{th} nucleotide in Exon 1 (c.31). In some embodiments, an engineered guide RNA targets the AUG at the 6^{th} nucleotide in Exon 5 (c.379). With reference to the 2N4R Tau isoform containing 441 amino acids (Np_005901; GRCh37/Hg19), these three TISs correspond to methionines (Met) 1, 11 and 127, respectively. In some embodiments, an engineered guide RNA targets the AUG at the 108^{th} nucleotide in Exon 1 (c.91). In some embodiments, one or more than one engineered guide RNAs of the present disclosure target any one or any combination of said four TISs. For example, a single engineered guide RNA of the present disclosure can be designed to target more than one of the above four TISs. In some embodiments, more than one engineered guide RNAs are designed to each independently target more than one of the above four TISs. In some embodiments, engineered guide RNAs of the present disclosure can target any one or any combination of the TISs in Exon 1 (c.1, c.31, and c.91). Targeting these sites in MAPT facilitate edits that result in inhibition of translation and a reduction in expression of the Tau protein. In some embodiments, the ratio of 3R to 4R isoforms of Tau can be measured by protein analysis (e.g., using an ELISA or flow cytometry) to evaluate the effect of RNA editing, with a 1 to 1 ratio representing the ratio in healthy adult brain. In some embodiments, any of the engineered guide RNAs disclosed herein are packaged in an AAV vector and are virally delivered.

[0333] In some embodiments, the engineered guide RNAs target a non-coding sequence in MAPT. The non-coding sequence can be a polyA signal sequence and the engineered guide RNA can facilitate ADAR-mediated RNA editing of one or more adenosines in the polyA signal sequence of MAPT. In some embodiments, engineered guide RNAs of the present disclosure can be multiplexed to target more than one polyA signal sequences in MAPT. In some embodiments, engineered guide RNAs of the present disclosure can be multiplexed to target the TIS and one or more polyA signal sequences in MAPT. In some embodiments, engineered guide RNAs can be multiplexed to target a non-coding sequence and a coding sequence in MAPT. The engineered guide RNAs of the present disclosure facilitated ADAR-mediated RNA editing of MAPT, thereby, effecting protein knockdown.

[0334] In some embodiments, the engineered guide RNAs of the present disclosure facilitated ADAR-mediated RNA editing of from 1 to 100% of a target adenosine. The engineered guide RNAs of the present disclosure can facilitate from 40 to 90% editing of a target adenosine. In some embodiments, the engineered guide RNAs of the present disclosure can facilitate at least 5%, at least 10%, at least 15%, at least 20%, at least 25%, at least 30%, at least 35%, at least 40%, at least 45%, at least 50%, at least 55%, at least 60%, at least 65%, at least 70%, at least 75%, at least 80%, at least 85%, at least 90%, at least 95%, 100%, from 5 to 20%, from 20 to 40%, from 40 to 60%, from 60 to 80%, from 80 to 100%, from 60 to 80%, from 70 to 90%, or up to 90% or more RNA editing of a target adenosine. Optionally, additionally, the engineered guide RNAs of the present disclosure can facilitate these levels of on-target RNA editing while maintaining less than 10% editing of an off-target adenosine. Optionally, additionally, the engineered guide RNAs of the present disclosure can facilitate these levels of on-target RNA editing while maintaining less than less than 30%, less than 25%, less than 20%, less than 15%, less than 10%, less than 9%, less than 8%, less than 7%, less than 6%, less than 5%, less than 4%, less than 3%, less than 2%, less than 1%, or 0% editing of an off-target adenosine.

[0335] In some embodiments, the engineered guide RNAs of the present disclosure facilitate ADAR-mediated RNA editing of MAPT, which results in knockdown of protein levels. The knockdown in protein levels is quantitated as a reduction in expression of the Tau protein. The engineered guide RNAs of the present disclosure can facilitate from 1% to 100% Tau protein knockdown. The engineered guide RNAs of the present disclosure can facilitate from 1% to 10%, from 10% to 20%, from 20% to 30%, from 30% to 40%, from 40% to 50%, from 50% to 60%, from 60% to 70%, from 70% to 80%, from 80% to 90%, from 90% to 100%, from 20% to 40%, from 30% to 50%, from 40% to 60%, from 50% to 70%, from 60% to 80%, from 20% to 50%, from 30% to 60%, at least 5%, at least 10%, at least 15%, at least 20%, at least 25%, at least 30%, at least 35%, at least 40%, at least 45%, at least 50%, at least 55%, at least 60%, at least 65%, at least 70%, at least 75%, at least 80%, at least 85%, or at least 90% Tau protein knockdown. In some embodiments, the engineered guide RNAs of the present disclosure facilitate from 30% to 60% Tau protein knockdown. Tau protein knockdown can be measured by an assay comparing a sample or subject treated with the engineered guide RNA to a control sample or subject not treated with the engineered guide RNA.

### α-Synuclein

[0336] The alpha-synuclein gene is made up of 5 exons and encodes a 140 amino-acid protein with a predicted molecular mass of ˜14.5 kDa. The encoded product is an intrinsically disordered protein with unknown functions. Usually, Alpha-synuclein is a monomer. Under certain stress conditions or other unknown causes, α-synuclein self-aggregates into oligomers. Lewy-related pathology (LRP), primarily comprised of Alpha-synuclein in more than 50% of autopsy-confirmed Alzheimer's disease patients' brains. While the molecular mechanism of how Alpha-synuclein affects the development of Alzheimer's disease is unclear, experimental evidence has shown that Alpha-synuclein interacts with Tau-p and may seed the intracellular aggregation of Tau-p. Moreover, Alpha-synuclein could regulate the activity of GSK3β, which can mediate Tau-hyperphosphorylation. Alpha-synuclein can also self-assemble into pathogenic aggregates (Lewy bodies). Both Tau and α-synuclein can be released into the extracellular space and spread to other cells. Vascular abnormalities impair the supply of nutrients and removal of metabolic byproducts, cause microinfarcts, and promote the activation of glial cells. Therefore, a multiplex strategy to substantially reduce Tau formation, alpha-synuclein formation, or a combination thereof can be important in effectively treating neurodegenerative diseases.

[0337] The domain structure of Alpha-synuclein comprises an N-terminal A2 lipid-binding alpha-helix domain, a non-amyloid p component (NAC) domain, and a C-terminal acidic domain. Molecularly, Alpha-synuclein is suggested to play a role in neuronal transmission and DNA repair. In some cases, a region of Alpha-synuclein can be targeted utilizing compositions provided herein. In some cases, a region of the Alpha-synuclein mRNA can be targeted with the engineered polynucleotides disclosed herein for knockdown. In some cases, a region of the exon or intron of the Alpha-synuclein mRNA can be targeted. In some embodiments, a region of the non-coding sequence of the Alpha-synuclein mRNA, such as the 5′UTR and 3′UTR, can be targeted. In other cases, a region of the coding sequence of the Alpha-synuclein mRNA can be targeted. Suitable regions include but are not limited to a N-terminal A2 lipid-binding alpha-helix domain, a non-amyloid p component (NAC) domain, or a C-terminal acidic domain.

[0338] In some aspects, an alpha-synuclein mRNA sequence is targeted. In some cases, any one of the 3,177 residues of the sequence may be targeted utilizing the compositions and method provided herein. In some cases, a target residue may be located among residues 1 to 100, from 99 to 200, from 199 to 300, from 299 to 400, from 399 to 500, from 499 to 600, from 599 to 700, from 699 to 800, from 799 to 900, from 899 to 1000, from 999 to 1100, from 1099 to 1200, from 1199 to 1300, from 1299 to 1400, from 1399 to 1500, from 1499 to 1600, from 1599 to 1700, from 1699 to 1800, from 1799 to 1900, from 1899 to 2000, from 1999 to 2100, from 2099 to 2200, from 2199 to 2300, from 2299 to 2400, from 2399 to 2500, from 2499 to 2600, from 2599 to 2700, from 2699 to 2800, from 2799 to 2900, from 2899 to 3000, from 2999 to 3100, from 3099 to 3177, or any combination thereof.

[0339] In some embodiments, the present disclosure provides expression cassettes encoding engineered guide RNAs that target SNCA. The engineered guide RNAs may target SNCA to modify or alter expression of SNCA. In some embodiments, targeting SNCA with the engineered guide RNAs of the present disclosure may treat a disease associated with SNCA, such as synucleinopathies, Parkinson's disease, Lewy body dementia, or multiple system atrophy. In some embodiments, the engineered guide RNAs may facilitate ADAR-mediated RNA editing of SNCA to correct G to A mutations by targeting adenosines for deamination. The engineered guide RNAs of the present disclosure may target a coding sequence in SNCA. For example, the coding sequence can be a translation initiation site (TIS) (AUG) of AUG, and the engineered guide RNA can facilitate ADAR-mediated RNA editing of AUG to GUG. Editing of the TIS may affect protein knockdown of SNCA. In another example, the guide RNA can facilitate ADAR-mediated correction of missense mutations in the coding sequence. Correcting a missense mutation may increase expression of functional SNCA protein. In another example, the guide RNA can facilitate ADAR-mediated correction of nonsense mutations in the coding sequence. Correcting a nonsense mutation may increase expression of SNCA protein.

[0340] In some embodiments, the engineered guide RNAs target a non-coding sequence in SNCA. The non-coding sequence can be a polyA signal sequence and the engineered guide RNA can facilitate ADAR-mediated RNA editing of one or more adenosines in the polyA signal sequence of SNCA. In some embodiments, engineered guide RNAs of the present disclosure can be multiplexed to target more than one polyA signal sequences in SNCA. In some embodiments, engineered guide RNAs of the present disclosure can be multiplexed to target the TIS and one or more polyA signal sequences in SNCA. In some embodiments, engineered guide RNAs can be multiplexed to target a non-coding sequence and a coding sequence in SNCA. The engineered guide RNAs of the present disclosure facilitated ADAR-mediated RNA editing of SNCA, thereby, affecting protein knockdown.

[0341] In some embodiments, the engineered guide RNAs of the present disclosure facilitated ADAR-mediated RNA editing of from 1 to 100% of a target adenosine in SNCA. The engineered guide RNAs of the present disclosure can facilitate from 40 to 90% editing of a target adenosine. In some embodiments, the engineered guide RNAs of the present disclosure can facilitate at least 5%, at least 10%, at least 15%, at least 20%, at least 25%, at least 30%, at least 35%, at least 40%, at least 45%, at least 50%, at least 55%, at least 60%, at least 65%, at least 70%, at least 75%, at least 80%, at least 85%, at least 90%, at least 95%, 100%, from 5 to 20%, from 20 to 40%, from 40 to 60%, from 60 to 80%, from 80 to 100%, from 60 to 80%, from 70 to 90%, or up to 90% or more RNA editing of a target adenosine. Optionally, additionally, the engineered guide RNAs of the present disclosure can facilitate these levels of on-target RNA editing while maintaining less than 10% editing of an off-target adenosine. Optionally, additionally, the engineered guide RNAs of the present disclosure can facilitate these levels of on-target RNA editing while maintaining less than less than 30%, less than 25%, less than 20%, less than 15%, less than 10%, less than 9%, less than 8%, less than 7%, less than 6%, less than 5%, less than 4%, less than 3%, less than 2%, less than 1%, or 0% editing of an off-target adenosine.

[0342] In some embodiments, the engineered guide RNAs of the present disclosure facilitate ADAR-mediated RNA editing of SNCA, which results in knockdown of protein levels. The knockdown in protein levels is quantitated as a reduction in expression of protein. The engineered guide RNAs of the present disclosure can facilitate from 1% to 100% protein knockdown. The engineered guide RNAs of the present disclosure can facilitate from 1% to 10%, from 10% to 20%, from 20% to 30%, from 30% to 40%, from 40% to 50%, from 50% to 60%, from 60% to 70%, from 70% to 80%, from 80% to 90%, from 90% to 100%, from 20% to 40%, from 30% to 50%, from 40% to 60%, from 50% to 70%, from 60% to 80%, from 20% to 50%, from 30% to 60%, at least 5%, at least 10%, at least 15%, at least 20%, at least 25%, at least 30%, at least 35%, at least 40%, at least 45%, at least 50%, at least 55%, at least 60%, at least 65%, at least 70%, at least 75%, at least 80%, at least 85%, or at least 90% protein knockdown. In some embodiments, the engineered guide RNAs of the present disclosure facilitate from 30% to 60% protein knockdown. Protein knockdown can be measured by an assay comparing a sample or subject treated with the engineered guide RNA to a control sample or subject not treated with the engineered guide RNA.

[0343] In some embodiments, the engineered guide RNAs of the present disclosure facilitate ADAR-mediated RNA editing of SNCA, which results in increased protein expression levels. The knockdown in protein levels is quantitated as an increase in expression of the target protein. The engineered guide RNAs of the present disclosure can facilitate from 1.1-fold to 1000-fold increased protein expression. The engineered guide RNAs of the present disclosure can facilitate from 1.1-fold to 1000-fold, from 1.5-fold to 1000-fold, from 2-fold to 1000-fold, from 5-fold to 1000-fold, from 10-fold to 1000-fold, from 20-fold to 1000-fold, from 50-fold to 1000-fold, from 100-fold to 1000-fold, from 200-fold to 1000-fold, from 500-fold to 1000-fold, from 1.1-fold to 10-fold, from 1.5-fold to 10-fold, from 2-fold to 10-fold, from 5-fold to 10-fold, from 10-fold to 100-fold, from 20-fold to 100-fold, or from 50-fold to 100-fold increased protein expression. In some embodiments, the engineered guide RNAs of the present disclosure facilitate at least 1.1-fold, at least 1.5-fold, at least 2-fold, at least 5-fold, at least 10-fold, at least 20-fold, at least 50-fold, at least 100-fold, at least 200-fold, or at least 500-fold increased expression. Increase in protein expression can be measured by an assay comparing a sample or subject treated with the engineered guide RNA to a control sample or subject not treated with the engineered guide RNA.

### PMP22

[0344] Peripheral myelin protein 22, encoded by PMP22, is involved in myelinating Schwann cells of the peripheral nervous system. Duplication or deletion of PMP22, and corresponding alteration of gene expression levels, is associated with a variety of diseases, including Charcot-Marie-Tooth type 1A (CMT1A), Dejerine-Sottas disease, and Hereditary Neuropathy with Liability to Pressure Palsy (HNPP). Described herein are methods of editing or modifying expression of PMP22 using an expression cassette encoding an engineered RNA payload to treat a disease (e.g., Charcot-Marie-Tooth disease, Dejerine-Sottas disease, or hereditary neuropathy).

[0345] In some embodiments, the present disclosure provides expression cassettes encoding engineered guide RNAs that target PMP22. The engineered guide RNAs may target PMP22 to modify or alter expression of PMP22. In some embodiments, targeting PMP22 with the engineered guide RNAs of the present disclosure may treat a disease associated with PMP22, such as Charcot-Marie-Tooth disease, Dejerine-Sottas disease, or hereditary neuropathy. In some embodiments, the engineered guide RNAs may facilitate ADAR-mediated RNA editing of PMP22 to correct G to A mutations by targeting adenosines for deamination. The engineered guide RNAs of the present disclosure may target a coding sequence in PMP22. For example, the coding sequence can be a translation initiation site (TIS) (AUG) of AUG, and the engineered guide RNA can facilitate ADAR-mediated RNA editing of AUG to GUG. Editing of the TIS may affect protein knockdown of PMP22. In another example, the guide RNA can facilitate ADAR-mediated correction of missense mutations in the coding sequence. Correcting a missense mutation may increase expression of functional PMP22 protein. In another example, the guide RNA can facilitate ADAR-mediated correction of nonsense mutations in the coding sequence. Correcting a nonsense mutation may increase expression of PMP22 protein.

[0346] In some embodiments, the engineered guide RNAs target a non-coding sequence in PMP22. The non-coding sequence can be a polyA signal sequence and the engineered guide RNA can facilitate ADAR-mediated RNA editing of one or more adenosines in the polyA signal sequence of PMP22. In some embodiments, engineered guide RNAs of the present disclosure can be multiplexed to target more than one polyA signal sequences in PMP22. In some embodiments, engineered guide RNAs of the present disclosure can be multiplexed to target the TIS and one or more polyA signal sequences in PMP22. In some embodiments, engineered guide RNAs can be multiplexed to target a non-coding sequence and a coding sequence in PMP22. The engineered guide RNAs of the present disclosure facilitated ADAR-mediated RNA editing of PMP22, thereby, affecting protein knockdown.

[0347] In some embodiments, the engineered guide RNAs of the present disclosure facilitated ADAR-mediated RNA editing of from 1 to 100% of a target adenosine in PMP22. The engineered guide RNAs of the present disclosure can facilitate from 40 to 90% editing of a target adenosine. In some embodiments, the engineered guide RNAs of the present disclosure can facilitate at least 5%, at least 10%, at least 15%, at least 20%, at least 25%, at least 30%, at least 35%, at least 40%, at least 45%, at least 50%, at least 55%, at least 60%, at least 65%, at least 70%, at least 75%, at least 80%, at least 85%, at least 90%, at least 95%, 100%, from 5 to 20%, from 20 to 40%, from 40 to 60%, from 60 to 80%, from 80 to 100%, from 60 to 80%, from 70 to 90%, or up to 90% or more RNA editing of a target adenosine. Optionally, additionally, the engineered guide RNAs of the present disclosure can facilitate these levels of on-target RNA editing while maintaining less than 10% editing of an off-target adenosine. Optionally, additionally, the engineered guide RNAs of the present disclosure can facilitate these levels of on-target RNA editing while maintaining less than less than 30%, less than 25%, less than 20%, less than 15%, less than 10%, less than 9%, less than 8%, less than 7%, less than 6%, less than 5%, less than 4%, less than 3%, less than 2%, less than 1%, or 0% editing of an off-target adenosine.

[0348] In some embodiments, the engineered guide RNAs of the present disclosure facilitate ADAR-mediated RNA editing of PMP22, which results in knockdown of protein levels. The knockdown in protein levels is quantitated as a reduction in expression of protein. The engineered guide RNAs of the present disclosure can facilitate from 1% to 100% protein knockdown. The engineered guide RNAs of the present disclosure can facilitate from 1% to 10%, from 10% to 20%, from 20% to 30%, from 30% to 40%, from 40% to 50%, from 50% to 60%, from 60% to 70%, from 70% to 80%, from 80% to 90%, from 90% to 100%, from 20% to 40%, from 30% to 50%, from 40% to 60%, from 50% to 70%, from 60% to 80%, from 20% to 50%, from 30% to 60%, at least 5%, at least 10%, at least 15%, at least 20%, at least 25%, at least 30%, at least 35%, at least 40%, at least 45%, at least 50%, at least 55%, at least 60%, at least 65%, at least 70%, at least 75%, at least 80%, at least 85%, or at least 90% protein knockdown. In some embodiments, the engineered guide RNAs of the present disclosure facilitate from 30% to 60% protein knockdown. Protein knockdown can be measured by an assay comparing a sample or subject treated with the engineered guide RNA to a control sample or subject not treated with the engineered guide RNA.

[0349] In some embodiments, the engineered guide RNAs of the present disclosure facilitate ADAR-mediated RNA editing of PMP22, which results in increased protein expression levels. The knockdown in protein levels is quantitated as an increase in expression of the target protein. The engineered guide RNAs of the present disclosure can facilitate from 1.1-fold to 1000-fold increased protein expression. The engineered guide RNAs of the present disclosure can facilitate from 1.1-fold to 1000-fold, from 1.5-fold to 1000-fold, from 2-fold to 1000-fold, from 5-fold to 1000-fold, from 10-fold to 1000-fold, from 20-fold to 1000-fold, from 50-fold to 1000-fold, from 100-fold to 1000-fold, from 200-fold to 1000-fold, from 500-fold to 1000-fold, from 1.1-fold to 10-fold, from 1.5-fold to 10-fold, from 2-fold to 10-fold, from 5-fold to 10-fold, from 10-fold to 100-fold, from 20-fold to 100-fold, or from 50-fold to 100-fold increased protein expression. In some embodiments, the engineered guide RNAs of the present disclosure facilitate at least 1.1-fold, at least 1.5-fold, at least 2-fold, at least 5-fold, at least 10-fold, at least 20-fold, at least 50-fold, at least 100-fold, at least 200-fold, or at least 500-fold increased expression. Increase in protein expression can be measured by an assay comparing a sample or subject treated with the engineered guide RNA to a control sample or subject not treated with the engineered guide RNA.

### LRRK2

[0350] Leucine-rich repeat kinase 2 (LRRK2) has been associated with familial and sporadic cases of Parkinson's Disease and immune-related disorders like Crohn's disease. Its aliases include LRRK2, AURA17, DARDARIN, PARK8, RIPK7, ROCO2, or leucine-rich repeat kinase 2. The LRRK2 gene is made up of 51 exons and encodes a 2527 amino acid protein with a predicted molecular mass of about 286 kDa. The encoded product is a multi-domain protein with kinase and GTPase activities. LRRK2 can be found in various tissues and organs including but not limited to adrenal, appendix, bone marrow, brain, colon, duodenum, endometrium, esophagus, fat, gall bladder, heart, kidney, liver, lung, lymph node, ovary, pancreas, placenta, prostate, salivary gland, skin, small intestine, spleen, stomach, testis, thyroid, and urinary bladder. LRRK2 can be ubiquitously expressed but is generally more abundant in the brain, kidney, and lung tissue. Cellularly, LRRK2 has been found in astrocytes, endothelial cells, microglia, neurons, and peripheral immune cells.

[0351] Over 100 mutations have been identified in LRRK2; six of them—G2019S, R1441C/G/H, Y1699C, and I2020T have been shown to cause Parkinson's Disease through segregation analysis. G2019S and R1441C are the most common disease-causing mutations in inherited cases. In sporadic cases, these mutations have shown age-dependent penetrance: The percentage of individuals carrying the G2019S mutation that develops the disease jumps from 17% to 85% when the age increases from 50 to 70 years old. In some cases, mutation carrying individuals never develop the disease.

[0352] At its catalytic core, LRRK2 contains the Ras of complex proteins (Roc), C-terminal of ROC (COR), and kinase domains. Multiple protein-protein interaction domains flank this core: an armadillo repeats (ARM) region, an ankyrin repeat (ANK) region, a leucine-rich repeat (LRR) domain are found in the N-terminus joined by a C-terminal WD40 domain. The G2019S mutation is located within the kinase domain. It has been shown to increase the kinase activity; for R1441C/G/H and Y1699C, these mutations can decrease the GTPase activity of the Roc domain. Genome-wide association study has found that common variations in LRRK2 increase the risk of developing sporadic Parkinson's Disease. While some of these variations are nonconservative mutations that affect the protein's binding or catalytic activities, others modulate its expression. These results suggest that specific alleles or haplotypes can regulate LRRK2 expression.

[0353] Pro-inflammatory signals upregulate LRRK2 expression in various immune cell types, suggesting that LRRK2 is a critical regulator in the immune response. Studies have found that both systemic and central nervous system (CNS) inflammation are involved in Parkinson's Disease's symptoms. Moreover, LRRK2 mutations associated with Parkinson's Disease modulate its expression levels in response to inflammatory stimuli. Many mutations in LRRK2 are associated with immune-related disorders such as inflammatory bowel disease such as Crohn's Disease. For example, both G2019S and N2081D increase LRRK2's kinase activity and are over-represented in Crohn's Disease patients in specific populations. Because of its critical role in these disorders, LRRK2 is an important therapeutic target for Parkinson's Disease and Crohn's Disease. In particular, many mutations, such as point mutations including G2019S, play roles in developing these diseases, making LRRK2 an attractive for therapeutic strategy such as RNA editing.

[0354] In some embodiments, the present disclosure provides expression cassettes encoding guide RNAs that are capable of facilitating RNA editing of LRRK2. In some embodiments, a guide RNA of the present disclosure can target the following mutations in LRRK2: E10L, A30P, S52F, E46K, A53T, L119P, A211V, C228S, E334K, N363S, V366M, A419V, R506Q, N544E, N551K, A716V, M712V, I723V, P755L, R793M, I810V, K871E, Q923H, Q930R, R1067Q, S1096C, Q1111H, I1122V, A1151T, L1165P, I1192V, H1216R, S1228T, P1262A, R1325Q, I1371V, R1398H, T1410M, D1420N, R1441G, R1441H, A1442P, P1446L, V1450I, K1468E, R1483Q, R1514Q, P1542S, V1613A, R1628P, M1646T, S1647T, Y1699C, R1728H, R1728L, L1795F, M1869V, M1869T, L1870F, E1874X, R1941H, Y2006H, I2012T, G2019S, I2020T, T2031S, N2081D, T2141M, R2143H, Y2189C, T2356I, G2385R, V2390M, E2395K, M2397T, L2466H, or Q2490NfsX3. Said guide RNAs targeting a site in LRRK2 can be encoded by an engineered polynucleotide construct of the present disclosure.

[0355] In some examples, hybridization of a latent guide RNA targeting LRRK2 to a target LRRK2 mRNA produces a guide-target RNA scaffold that comprises a structural features selected from the group consisting of: (i) one or more X1/X2 bulges, wherein Xi is the number of nucleotides of the target RNA in the bulge and X2 is the number of nucleotides of the engineered guide RNA in the bulge, and wherein the one or more bulges is a 0/1 asymmetric bulge, a 2/2 symmetric bulge, a 3/3 symmetric bulge, or a 4/4 symmetric bulge; (ii) one or more X1/X2 internal loops, wherein Xi is the number of nucleotides of the target RNA in the internal loop and X2 is the number of nucleotides of the engineered guide RNA in the internal loop, and wherein the one or more internal loops is a 5/0 asymmetric internal loop, a 5/4 asymmetric internal loop, a 5/5 symmetric internal loop, a 6/6 symmetric internal loop, a 7/7 symmetric internal loop, or a 10/10 symmetric internal loop; (iii) one or more mismatches, wherein the one or more mismatches is an A/C mismatch, an A/G mismatch, a C/U mismatch, a G/A mismatch, or a C/C mismatch, (iv) a G/U wobble base pair or a U/G wobble base pair, and (v) any combination thereof. Said engineered guide RNAs can be delivered via viral vector (e.g., encoded for and delivered via AAV) as disclosed herein and can be administered via any route of administration disclosed herein to a subject in need thereof. The subject can be human and may be at risk of developing or has developed a disease or condition associated with mutations in LRRK2 (e.g., diseases of the central nervous system (CNS) or gastrointestinal (GI) tract). For example, such diseases of conditions can include Crohn's disease or Parkinson's disease. Such CNS or GI tract diseases (e.g., Crohn's disease or Parkinson's disease) can be at least partially caused by a mutation of LRRK2, for which an engineered guide RNA described herein can facilitate editing in, thus correcting the mutation in LRRK2 and reducing the incidence of the CNS or GI tract disease in the subject. Thus, the guide RNAs of the present disclosure can be used in a method of treatment of diseases such as Crohn's disease or Parkinson's disease.

[0356] In some embodiments, the present disclosure provides expression cassettes encoding engineered guide RNAs that target LRRK2. The engineered guide RNAs may target LRRK2 to modify or alter expression of LRRK2. In some embodiments, targeting LRRK2 with the engineered guide RNAs of the present disclosure may treat a disease associated with LRRK2, such as Parkinson's disease or Crohn's disease. In some embodiments, the engineered guide RNAs may facilitate ADAR-mediated RNA editing of LRRK2 to correct G to A mutations by targeting adenosines for deamination. The engineered guide RNAs of the present disclosure may target a coding sequence in LRRK2. For example, the coding sequence can be a translation initiation site (TIS) (AUG) of AUG, and the engineered guide RNA can facilitate ADAR-mediated RNA editing of AUG to GUG. Editing of the TIS may affect protein knockdown of LRRK2. In another example, the guide RNA can facilitate ADAR-mediated correction of missense mutations in the coding sequence. Correcting a missense mutation may increase expression of functional LRRK2 protein. In another example, the guide RNA can facilitate ADAR-mediated correction of nonsense mutations in the coding sequence. Correcting a nonsense mutation may increase expression of LRRK2 protein.

[0357] In some embodiments, the engineered guide RNAs target a non-coding sequence in LRRK2. The non-coding sequence can be a polyA signal sequence and the engineered guide RNA can facilitate ADAR-mediated RNA editing of one or more adenosines in the polyA signal sequence of LRRK2. In some embodiments, engineered guide RNAs of the present disclosure can be multiplexed to target more than one polyA signal sequences in LRRK2. In some embodiments, engineered guide RNAs of the present disclosure can be multiplexed to target the TIS and one or more polyA signal sequences in LRRK2. In some embodiments, engineered guide RNAs can be multiplexed to target a non-coding sequence and a coding sequence in LRRK2. The engineered guide RNAs of the present disclosure facilitated ADAR-mediated RNA editing of LRRK2, thereby, affecting protein knockdown.

[0358] In some embodiments, the engineered guide RNAs of the present disclosure facilitated ADAR-mediated RNA editing of from 1 to 100% of a target adenosine in LRRK2. The engineered guide RNAs of the present disclosure can facilitate from 40 to 90% editing of a target adenosine. In some embodiments, the engineered guide RNAs of the present disclosure can facilitate at least 5%, at least 10%, at least 15%, at least 20%, at least 25%, at least 30%, at least 35%, at least 40%, at least 45%, at least 50%, at least 55%, at least 60%, at least 65%, at least 70%, at least 75%, at least 80%, at least 85%, at least 90%, at least 95%, 100%, from 5 to 20%, from 20 to 40%, from 40 to 60%, from 60 to 80%, from 80 to 100%, from 60 to 80%, from 70 to 90%, or up to 90% or more RNA editing of a target adenosine. Optionally, additionally, the engineered guide RNAs of the present disclosure can facilitate these levels of on-target RNA editing while maintaining less than 10% editing of an off-target adenosine. Optionally, additionally, the engineered guide RNAs of the present disclosure can facilitate these levels of on-target RNA editing while maintaining less than less than 30%, less than 25%, less than 20%, less than 15%, less than 10%, less than 9%, less than 8%, less than 7%, less than 6%, less than 5%, less than 4%, less than 3%, less than 2%, less than 1%, or 0% editing of an off-target adenosine.

[0359] In some embodiments, the engineered guide RNAs of the present disclosure facilitate ADAR-mediated RNA editing of LRRK2, which results in knockdown of protein levels. The knockdown in protein levels is quantitated as a reduction in expression of protein. The engineered guide RNAs of the present disclosure can facilitate from 1% to 100% protein knockdown. The engineered guide RNAs of the present disclosure can facilitate from 1% to 10%, from 10% to 20%, from 20% to 30%, from 30% to 40%, from 40% to 50%, from 50% to 60%, from 60% to 70%, from 70% to 80%, from 80% to 90%, from 90% to 100%, from 20% to 40%, from 30% to 50%, from 40% to 60%, from 50% to 70%, from 60% to 80%, from 20% to 50%, from 30% to 60%, at least 5%, at least 10%, at least 15%, at least 20%, at least 25%, at least 30%, at least 35%, at least 40%, at least 45%, at least 50%, at least 55%, at least 60%, at least 65%, at least 70%, at least 75%, at least 80%, at least 85%, or at least 90% protein knockdown. In some embodiments, the engineered guide RNAs of the present disclosure facilitate from 30% to 60% protein knockdown. Protein knockdown can be measured by an assay comparing a sample or subject treated with the engineered guide RNA to a control sample or subject not treated with the engineered guide RNA.

[0360] In some embodiments, the engineered guide RNAs of the present disclosure facilitate ADAR-mediated RNA editing of LRRK2, which results in increased protein expression levels. The knockdown in protein levels is quantitated as an increase in expression of the target protein. The engineered guide RNAs of the present disclosure can facilitate from 1.1-fold to 1000-fold increased protein expression. The engineered guide RNAs of the present disclosure can facilitate from 1.1-fold to 1000-fold, from 1.5-fold to 1000-fold, from 2-fold to 1000-fold, from 5-fold to 1000-fold, from 10-fold to 1000-fold, from 20-fold to 1000-fold, from 50-fold to 1000-fold, from 100-fold to 1000-fold, from 200-fold to 1000-fold, from 500-fold to 1000-fold, from 1.1-fold to 10-fold, from 1.5-fold to 10-fold, from 2-fold to 10-fold, from 5-fold to 10-fold, from 10-fold to 100-fold, from 20-fold to 100-fold, or from 50-fold to 100-fold increased protein expression. In some embodiments, the engineered guide RNAs of the present disclosure facilitate at least 1.1-fold, at least 1.5-fold, at least 2-fold, at least 5-fold, at least 10-fold, at least 20-fold, at least 50-fold, at least 100-fold, at least 200-fold, or at least 500-fold increased expression. Increase in protein expression can be measured by an assay comparing a sample or subject treated with the engineered guide RNA to a control sample or subject not treated with the engineered guide RNA.

### DUX4

[0361] Double homeobox, 4 (DUX4) functions as a transcriptional activator of a variety of genes, including PITX1, and regulates expression of small RNAs in muscle cells. In some embodiments, overexpression of DUX4 can cause B-cell leukemia. Described herein are methods of editing or modifying expression of DUX4 using an expression cassette encoding an engineered RNA payload to treat a disease (e.g., B-cell leukemia or facioscapulohumeral muscular dystrophy).

[0362] In some embodiments, the present disclosure provides expression cassettes encoding engineered guide RNAs that target DUX4. The engineered guide RNAs may target DUX4 to modify or alter expression of DUX4. In some embodiments, targeting DUX4 with the engineered guide RNAs of the present disclosure may treat a disease associated with DUX4, such as B-cell leukemia or facioscapulohumeral muscular dystrophy. In some embodiments, the engineered guide RNAs may facilitate ADAR-mediated RNA editing of DUX4 to correct G to A mutations by targeting adenosines for deamination. The engineered guide RNAs of the present disclosure may target a coding sequence in DUX4. For example, the coding sequence can be a translation initiation site (TIS) (AUG) of AUG, and the engineered guide RNA can facilitate ADAR-mediated RNA editing of AUG to GUG. Editing of the TIS may affect protein knockdown of DUX4. In another example, the guide RNA can facilitate ADAR-mediated correction of missense mutations in the coding sequence. Correcting a missense mutation may increase expression of functional DUX4 protein. In another example, the guide RNA can facilitate ADAR-mediated correction of nonsense mutations in the coding sequence. Correcting a nonsense mutation may increase expression of DUX4 protein.

[0363] In some embodiments, the engineered guide RNAs target a non-coding sequence in DUX4. The non-coding sequence can be a polyA signal sequence and the engineered guide RNA can facilitate ADAR-mediated RNA editing of one or more adenosines in the polyA signal sequence of DUX4. In some embodiments, engineered guide RNAs of the present disclosure can be multiplexed to target more than one polyA signal sequences in DUX4. In some embodiments, engineered guide RNAs of the present disclosure can be multiplexed to target the TIS and one or more polyA signal sequences in DUX4. In some embodiments, engineered guide RNAs can be multiplexed to target a non-coding sequence and a coding sequence in DUX4. The engineered guide RNAs of the present disclosure facilitated ADAR-mediated RNA editing of DUX4, thereby, affecting protein knockdown.

[0364] In some embodiments, the engineered guide RNAs of the present disclosure facilitated ADAR-mediated RNA editing of from 1 to 100% of a target adenosine in DUX4. The engineered guide RNAs of the present disclosure can facilitate from 40 to 90% editing of a target adenosine. In some embodiments, the engineered guide RNAs of the present disclosure can facilitate at least 5%, at least 10%, at least 15%, at least 20%, at least 25%, at least 30%, at least 35%, at least 40%, at least 45%, at least 50%, at least 55%, at least 60%, at least 65%, at least 70%, at least 75%, at least 80%, at least 85%, at least 90%, at least 95%, 100%, from 5 to 20%, from 20 to 40%, from 40 to 60%, from 60 to 80%, from 80 to 100%, from 60 to 80%, from 70 to 90%, or up to 90% or more RNA editing of a target adenosine. Optionally, additionally, the engineered guide RNAs of the present disclosure can facilitate these levels of on-target RNA editing while maintaining less than 10% editing of an off-target adenosine. Optionally, additionally, the engineered guide RNAs of the present disclosure can facilitate these levels of on-target RNA editing while maintaining less than less than 30%, less than 25%, less than 20%, less than 15%, less than 10%, less than 9%, less than 8%, less than 7%, less than 6%, less than 5%, less than 4%, less than 3%, less than 2%, less than 1%, or 0% editing of an off-target adenosine.

[0365] In some embodiments, the engineered guide RNAs of the present disclosure facilitate ADAR-mediated RNA editing of DUX4, which results in knockdown of protein levels. The knockdown in protein levels is quantitated as a reduction in expression of protein. The engineered guide RNAs of the present disclosure can facilitate from 1% to 100% protein knockdown. The engineered guide RNAs of the present disclosure can facilitate from 1% to 10%, from 10% to 20%, from 20% to 30%, from 30% to 40%, from 40% to 50%, from 50% to 60%, from 60% to 70%, from 70% to 80%, from 80% to 90%, from 90% to 100%, from 20% to 40%, from 30% to 50%, from 40% to 60%, from 50% to 70%, from 60% to 80%, from 20% to 50%, from 30% to 60%, at least 5%, at least 10%, at least 15%, at least 20%, at least 25%, at least 30%, at least 35%, at least 40%, at least 45%, at least 50%, at least 55%, at least 60%, at least 65%, at least 70%, at least 75%, at least 80%, at least 85%, or at least 90% protein knockdown. In some embodiments, the engineered guide RNAs of the present disclosure facilitate from 30% to 60% protein knockdown. Protein knockdown can be measured by an assay comparing a sample or subject treated with the engineered guide RNA to a control sample or subject not treated with the engineered guide RNA.

[0366] In some embodiments, the engineered guide RNAs of the present disclosure facilitate ADAR-mediated RNA editing of DUX4, which results in increased protein expression levels. The knockdown in protein levels is quantitated as an increase in expression of the target protein. The engineered guide RNAs of the present disclosure can facilitate from 1.1-fold to 1000-fold increased protein expression. The engineered guide RNAs of the present disclosure can facilitate from 1.1-fold to 1000-fold, from 1.5-fold to 1000-fold, from 2-fold to 1000-fold, from 5-fold to 1000-fold, from 10-fold to 1000-fold, from 20-fold to 1000-fold, from 50-fold to 1000-fold, from 100-fold to 1000-fold, from 200-fold to 1000-fold, from 500-fold to 1000-fold, from 1.1-fold to 10-fold, from 1.5-fold to 10-fold, from 2-fold to 10-fold, from 5-fold to 10-fold, from 10-fold to 100-fold, from 20-fold to 100-fold, or from 50-fold to 100-fold increased protein expression. In some embodiments, the engineered guide RNAs of the present disclosure facilitate at least 1.1-fold, at least 1.5-fold, at least 2-fold, at least 5-fold, at least 10-fold, at least 20-fold, at least 50-fold, at least 100-fold, at least 200-fold, or at least 500-fold increased expression. Increase in protein expression can be measured by an assay comparing a sample or subject treated with the engineered guide RNA to a control sample or subject not treated with the engineered guide RNA.

### Progranulin

[0367] Progranulin, encoded by GRN, is a precursor protein cleaved to form granulin. GRN is expressed in peripheral and central nervous system tissues and is upregulated in microglia following injury. Both granulin and progranulin are implicated in a wide variety of functions, including development, inflammation, cell proliferation, and protein homeostasis. Mutations in GRN are implicated in frontotemporal dementia. Described herein are methods of editing or modifying expression of GRN using an expression cassette encoding an engineered RNA payload to treat a disease (e.g., frontotemporal dementia).

[0368] In some embodiments, the present disclosure provides expression cassettes encoding engineered guide RNAs that target GRN. The engineered guide RNAs may target GRN to modify or alter expression of GRN. In some embodiments, targeting GRN with the engineered guide RNAs of the present disclosure may treat a disease associated with GRN, such as frontotemporal dementia. In some embodiments, the engineered guide RNAs may facilitate ADAR-mediated RNA editing of GRN to correct G to A mutations by targeting adenosines for deamination. The engineered guide RNAs of the present disclosure may target a coding sequence in GRN. For example, the coding sequence can be a translation initiation site (TIS) (AUG) of AUG, and the engineered guide RNA can facilitate ADAR-mediated RNA editing of AUG to GUG. Editing of the TIS may affect protein knockdown of GRN. In another example, the guide RNA can facilitate ADAR-mediated correction of missense mutations in the coding sequence. Correcting a missense mutation may increase expression of functional GRN protein. In another example, the guide RNA can facilitate ADAR-mediated correction of nonsense mutations in the coding sequence. Correcting a nonsense mutation may increase expression of GRN protein.

[0369] In some embodiments, the engineered guide RNAs target a non-coding sequence in GRN. The non-coding sequence can be a polyA signal sequence and the engineered guide RNA can facilitate ADAR-mediated RNA editing of one or more adenosines in the polyA signal sequence of GRN. In some embodiments, engineered guide RNAs of the present disclosure can be multiplexed to target more than one polyA signal sequences in GRN. In some embodiments, engineered guide RNAs of the present disclosure can be multiplexed to target the TIS and one or more polyA signal sequences in GRN. In some embodiments, engineered guide RNAs can be multiplexed to target a non-coding sequence and a coding sequence in GRN. The engineered guide RNAs of the present disclosure facilitated ADAR-mediated RNA editing of GRN, thereby, affecting protein knockdown.

[0370] In some embodiments, the engineered guide RNAs of the present disclosure facilitated ADAR-mediated RNA editing of from 1 to 100% of a target adenosine in GRN. The engineered guide RNAs of the present disclosure can facilitate from 40 to 90% editing of a target adenosine. In some embodiments, the engineered guide RNAs of the present disclosure can facilitate at least 5%, at least 10%, at least 15%, at least 20%, at least 25%, at least 30%, at least 35%, at least 40%, at least 45%, at least 50%, at least 55%, at least 60%, at least 65%, at least 70%, at least 75%, at least 80%, at least 85%, at least 90%, at least 95%, 100%, from 5 to 20%, from 20 to 40%, from 40 to 60%, from 60 to 80%, from 80 to 100%, from 60 to 80%, from 70 to 90%, or up to 90% or more RNA editing of a target adenosine. Optionally, additionally, the engineered guide RNAs of the present disclosure can facilitate these levels of on-target RNA editing while maintaining less than 10% editing of an off-target adenosine. Optionally, additionally, the engineered guide RNAs of the present disclosure can facilitate these levels of on-target RNA editing while maintaining less than less than 30%, less than 25%, less than 20%, less than 15%, less than 10%, less than 9%, less than 8%, less than 7%, less than 6%, less than 5%, less than 4%, less than 3%, less than 2%, less than 1%, or 0% editing of an off-target adenosine.

[0371] In some embodiments, the engineered guide RNAs of the present disclosure facilitate ADAR-mediated RNA editing of GRN, which results in knockdown of protein levels. The knockdown in protein levels is quantitated as a reduction in expression of protein. The engineered guide RNAs of the present disclosure can facilitate from 1% to 100% protein knockdown. The engineered guide RNAs of the present disclosure can facilitate from 1% to 10%, from 10% to 20%, from 20% to 30%, from 30% to 40%, from 40% to 50%, from 50% to 60%, from 60% to 70%, from 70% to 80%, from 80% to 90%, from 90% to 100%, from 20% to 40%, from 30% to 50%, from 40% to 60%, from 50% to 70%, from 60% to 80%, from 20% to 50%, from 30% to 60%, at least 5%, at least 10%, at least 15%, at least 20%, at least 25%, at least 30%, at least 35%, at least 40%, at least 45%, at least 50%, at least 55%, at least 60%, at least 65%, at least 70%, at least 75%, at least 80%, at least 85%, or at least 90% protein knockdown. In some embodiments, the engineered guide RNAs of the present disclosure facilitate from 30% to 60% protein knockdown. Protein knockdown can be measured by an assay comparing a sample or subject treated with the engineered guide RNA to a control sample or subject not treated with the engineered guide RNA.

[0372] In some embodiments, the engineered guide RNAs of the present disclosure facilitate ADAR-mediated RNA editing of GRN, which results in increased protein expression levels. The knockdown in protein levels is quantitated as an increase in expression of the target protein. The engineered guide RNAs of the present disclosure can facilitate from 1.1-fold to 1000-fold increased protein expression. The engineered guide RNAs of the present disclosure can facilitate from 1.1-fold to 1000-fold, from 1.5-fold to 1000-fold, from 2-fold to 1000-fold, from 5-fold to 1000-fold, from 10-fold to 1000-fold, from 20-fold to 1000-fold, from 50-fold to 1000-fold, from 100-fold to 1000-fold, from 200-fold to 1000-fold, from 500-fold to 1000-fold, from 1.1-fold to 10-fold, from 1.5-fold to 10-fold, from 2-fold to 10-fold, from 5-fold to 10-fold, from 10-fold to 100-fold, from 20-fold to 100-fold, or from 50-fold to 100-fold increased protein expression. In some embodiments, the engineered guide RNAs of the present disclosure facilitate at least 1.1-fold, at least 1.5-fold, at least 2-fold, at least 5-fold, at least 10-fold, at least 20-fold, at least 50-fold, at least 100-fold, at least 200-fold, or at least 500-fold increased expression. Increase in protein expression can be measured by an assay comparing a sample or subject treated with the engineered guide RNA to a control sample or subject not treated with the engineered guide RNA.

### ABCA4

[0373] In some embodiments, the present disclosure provides expression cassettes encoding guide RNAs that are capable of facilitating RNA editing of ATP binding cassette subfamily A member 4 (ABCA4). In some examples, the disease or condition can be associated with a mutation in an ABCA4 gene. In some examples, the disease or condition can be Stargardt macular degeneration. In some examples, the Stargardt macular degeneration can be caused, at least in part, by a mutation in an ABCA4 gene. In some examples, the mutation comprises a substitution of a G with an A at nucleotide position 5882 in a wildtype ABCA4 gene. In some examples, the mutation comprises a G with an A at nucleotide position 5714 in a wildtype ABCA4 gene. In some examples, the mutation comprises a substitution of a G with an A at nucleotide position 6320 in a wildtype ABCA4 gene. In some examples, the double stranded substrate mimics one or more structural features of the naturally occurring ADAR substrate and comprises a target mRNA molecule encoded by the ABCA4 gene and an engineered guide that can be complementary, at least in part, to a portion of the target mRNA molecule.

[0374] In some examples, hybridization of a latent guide RNA targeting ABCA4 to a target ABCA4 mRNA produces a guide-target RNA scaffold that comprises a structural features selected from the group consisting of: (i) one or more X1/X2 bulges, wherein Xi is the number of nucleotides of the target RNA in the bulge and X2 is the number of nucleotides of the engineered guide RNA in the bulge, and wherein the one or more bulges is a 2/1 asymmetric bulge, a 1/0 asymmetric bulge, a 2/2 symmetric bulge, a 3/3 symmetric bulge, or a 4/4 symmetric bulge; (ii) an X1/X2 internal loop, wherein Xi is the number of nucleotides of the target RNA in the internal loop and X2 is the number of nucleotides of the engineered guide RNA in the internal loop, and wherein the internal loop is a 5/5 symmetric loop (iii) one or more mismatches, wherein the one or more mismatches is a G/G mismatch, an A/C mismatch, or a G/A mismatch, (iv) a G/U wobble base pair or a U/G wobble base pair, and (v) any combination thereof. In some embodiments, the guide-target RNA scaffold comprises a 2/1 asymmetric bulge, a 1/0 asymmetric bulge, a G/G mismatch, an A/C mismatch, and a 3/3 symmetric bulge. In some instances, the engineered latent guide RNA targeting ABCA4 comprises a G/G mismatch, a U/U mismatch, and a G/G mismatch. Said engineered guide RNAs can be delivered via viral vector (e.g., encoded for and delivered via AAV) as disclosed herein and can be administered via any route of administration disclosed herein to a subject in need thereof. The subject can be human and may be at risk of developing or has developed Stargardt macular degeneration (or Stargardt's disease). Such Stargardt macular degeneration can be at least partially caused by a mutation of ABCA4, for which an engineered guide RNA described herein can facilitate editing in, thus correcting the mutation in ABCA4 and reducing the incidence of Stargardt macular degeneration in the subject. Thus, the guide RNAs of the present disclosure can be used in a method of treatment of Stargardt macular degeneration.

[0375] In some embodiments, the present disclosure provides expression cassettes encoding engineered guide RNAs that target ABCA4. The engineered guide RNAs may target ABCA4 to modify or alter expression of ABCA4. In some embodiments, targeting ABCA4 with the engineered guide RNAs of the present disclosure may treat a disease associated with ABCA4, such as Stargardt disease. In some embodiments, the engineered guide RNAs may facilitate ADAR-mediated RNA editing of ABCA4 to correct G to A mutations by targeting adenosines for deamination. The engineered guide RNAs of the present disclosure may target a coding sequence in ABCA4. For example, the coding sequence can be a translation initiation site (TIS) (AUG) of AUG, and the engineered guide RNA can facilitate ADAR-mediated RNA editing of AUG to GUG. Editing of the TIS may affect protein knockdown of ABCA4. In another example, the guide RNA can facilitate ADAR-mediated correction of missense mutations in the coding sequence. Correcting a missense mutation may increase expression of functional ABCA4 protein. In another example, the guide RNA can facilitate ADAR-mediated correction of nonsense mutations in the coding sequence. Correcting a nonsense mutation may increase expression of ABCA4 protein.

[0376] In some embodiments, the engineered guide RNAs target a non-coding sequence in ABCA4. The non-coding sequence can be a polyA signal sequence and the engineered guide RNA can facilitate ADAR-mediated RNA editing of one or more adenosines in the polyA signal sequence of ABCA4. In some embodiments, engineered guide RNAs of the present disclosure can be multiplexed to target more than one polyA signal sequences in ABCA4. In some embodiments, engineered guide RNAs of the present disclosure can be multiplexed to target the TIS and one or more polyA signal sequences in ABCA4. In some embodiments, engineered guide RNAs can be multiplexed to target a non-coding sequence and a coding sequence in ABCA4. The engineered guide RNAs of the present disclosure facilitated ADAR-mediated RNA editing of ABCA4, thereby, affecting protein knockdown.

[0377] In some embodiments, the engineered guide RNAs of the present disclosure facilitated ADAR-mediated RNA editing of from 1 to 100% of a target adenosine in ABCA4. The engineered guide RNAs of the present disclosure can facilitate from 40 to 90% editing of a target adenosine. In some embodiments, the engineered guide RNAs of the present disclosure can facilitate at least 5%, at least 10%, at least 15%, at least 20%, at least 25%, at least 30%, at least 35%, at least 40%, at least 45%, at least 50%, at least 55%, at least 60%, at least 65%, at least 70%, at least 75%, at least 80%, at least 85%, at least 90%, at least 95%, 100%, from 5 to 20%, from 20 to 40%, from 40 to 60%, from 60 to 80%, from 80 to 100%, from 60 to 80%, from 70 to 90%, or up to 90% or more RNA editing of a target adenosine. Optionally, additionally, the engineered guide RNAs of the present disclosure can facilitate these levels of on-target RNA editing while maintaining less than 10% editing of an off-target adenosine. Optionally, additionally, the engineered guide RNAs of the present disclosure can facilitate these levels of on-target RNA editing while maintaining less than less than 30%, less than 25%, less than 20%, less than 15%, less than 10%, less than 9%, less than 8%, less than 7%, less than 6%, less than 5%, less than 4%, less than 3%, less than 2%, less than 1%, or 0% editing of an off-target adenosine.

[0378] In some embodiments, the engineered guide RNAs of the present disclosure facilitate ADAR-mediated RNA editing of ABCA4, which results in knockdown of protein levels. The knockdown in protein levels is quantitated as a reduction in expression of protein. The engineered guide RNAs of the present disclosure can facilitate from 1% to 100% protein knockdown. The engineered guide RNAs of the present disclosure can facilitate from 1% to 10%, from 10% to 20%, from 20% to 30%, from 30% to 40%, from 40% to 50%, from 50% to 60%, from 60% to 70%, from 70% to 80%, from 80% to 90%, from 90% to 100%, from 20% to 40%, from 30% to 50%, from 40% to 60%, from 50% to 70%, from 60% to 80%, from 20% to 50%, from 30% to 60%, at least 5%, at least 10%, at least 15%, at least 20%, at least 25%, at least 30%, at least 35%, at least 40%, at least 45%, at least 50%, at least 55%, at least 60%, at least 65%, at least 70%, at least 75%, at least 80%, at least 85%, or at least 90% protein knockdown. In some embodiments, the engineered guide RNAs of the present disclosure facilitate from 30% to 60% protein knockdown. Protein knockdown can be measured by an assay comparing a sample or subject treated with the engineered guide RNA to a control sample or subject not treated with the engineered guide RNA.

[0379] In some embodiments, the engineered guide RNAs of the present disclosure facilitate ADAR-mediated RNA editing of ABCA4, which results in increased protein expression levels. The knockdown in protein levels is quantitated as an increase in expression of the target protein. The engineered guide RNAs of the present disclosure can facilitate from 1.1-fold to 1000-fold increased protein expression. The engineered guide RNAs of the present disclosure can facilitate from 1.1-fold to 1000-fold, from 1.5-fold to 1000-fold, from 2-fold to 1000-fold, from 5-fold to 1000-fold, from 10-fold to 1000-fold, from 20-fold to 1000-fold, from 50-fold to 1000-fold, from 100-fold to 1000-fold, from 200-fold to 1000-fold, from 500-fold to 1000-fold, from 1.1-fold to 10-fold, from 1.5-fold to 10-fold, from 2-fold to 10-fold, from 5-fold to 10-fold, from 10-fold to 100-fold, from 20-fold to 100-fold, or from 50-fold to 100-fold increased protein expression. In some embodiments, the engineered guide RNAs of the present disclosure facilitate at least 1.1-fold, at least 1.5-fold, at least 2-fold, at least 5-fold, at least 10-fold, at least 20-fold, at least 50-fold, at least 100-fold, at least 200-fold, or at least 500-fold increased expression. Increase in protein expression can be measured by an assay comparing a sample or subject treated with the engineered guide RNA to a control sample or subject not treated with the engineered guide RNA.

### Amyloid Precursor Protein

[0380] An expression cassette of the present disclosure can be used to express an engineered polynucleotide payload sequence targeting an amyloid precursor protein (APP). In some embodiments, the engineered polynucleotides can target a secretase enzyme cleavage site in APP and edit said cleavage site in order to modulate processing and cleavage of APP by secretase enzymes (e.g., a beta secretase such as BACE1, cathepsin B or Meprin beta). In some embodiments, the engineered polynucleotides can modulate the expression of APP. In some cases, the engineered polynucleotides can modulate the transcription or post-transcriptional regulation of the APP mRNA or pre-mRNA. In other cases, the engineered polynucleotides can correct aberrant expression of splice variants generated by a mutation in APP. In some cases, the engineered polynucleotides can modulate the gene or protein translation of APP. In some embodiments, the engineered polynucleotides can decrease, down-regulate, or knock down the expression of APP by decreasing the abundance of the APP transcript. In some instances, the engineered polynucleotides can decrease or down-regulate the processing, splicing, turnover or stability of the APP transcript; or the accessibility of the APP transcript by translational machinery such as ribosome. In some cases, an engineered polynucleotide can facilitate a knockdown of APP. A knockdown can reduce the expression of APP. In some cases, a knockdown can be accompanied by editing of the APP mRNA or pre-mRNA. In some cases, a knockdown can occur with substantially little to no editing of the APP mRNA or pre-mRNA. In some instances, a knockdown can occur by targeting an untranslated region of the APP mRNA or pre-mRNA, such as a 3′ UTR, a 5′ UTR or both. In some cases, a knockdown can occur by targeting a coding region of the APP mRNA or pre-mRNA.

[0381] Compositions described herein can edit the cleavage site in APP, so that P/y secretases exhibit reduced cleavage of APP or can no longer cut APP, and therefore reduced levels of Abeta 40/Abeta 42 or no Abetas can be produced. Compositions consistent with the present disclosure may combine compositions for target APP cleavage site editing with compositions for Tau (e.g., a microtubule-associated protein Tau (MAPT) encoded from a MAPT gene) knockdown or compositions for Alpha-synuclein (SNCA) knockdown and can have synergistic effects to prevent and/or cure a neurodegenerative disease. The compositions and methods disclosed herein can yield results in editing and/or knockdown of targets without any of the resulting issues seen in small molecule or antibody therapy. Compositions can knockdown APP (instead of target cleavage site editing). Editing at the target cleavage site in APP and knockdown can be deployed singly or in combination.

[0382] In some cases, a targeting sequence of an engineered polynucleotide provided herein can at least partially hybridize to a region of a target RNA. A region of a target RNA can comprise: (a) a sequence that at least partially encodes for a suitable target provided herein, (b) a sequence that is proximal to a sequence that at least partially encodes for a suitable target provided herein, (c) comprises (a) and (b). For example, a region of a target RNA can comprise (a) a sequence that at least partially encodes for an APP, (b) a sequence that is proximal to a sequence that at least partially encodes for an APP, or (c) comprises (a) and (b). Other suitable targets can be targeted with engineered polynucleotides disclosed herein. Amyloid precursor protein (APP)

[0383] Pathogenic cleavage of amyloid precursor protein (APP) can create Amyloid beta (Abeta) fragments, which has been implicated in Alzheimer's disease. The accumulation of Abeta fragments can: impair synaptic functions and related signaling pathways, change neuronal activities, trigger the release of neurotoxic mediators from glial cells, or any combination thereof. Abeta can alter kinase function, leading to Tau hyperphosphorylation.

[0384] The generation of Abeta by enzymatic cleavages of the β-amyloid precursor protein (APP) is an important player in Alzheimer's disease. The non-amyloidogenic APP processing pathway involves cleavages by alpha- and gamma-secretase. The cleavage by alpha-secretase generates a long form of secreted APP (APPs alpha) and a C-terminal fragment (alpha-CTF). Further processing of alpha-CTF by gamma-secretase generates a p3 and AICD fragment. The amyloidogenic APP processing pathway instead involves cleavages by beta- and gamma-secretase. The cleavage by beta-secretase generates a short form of secreted APP (APPs beta) and a C-terminal fragment (beta-CTF). Further processing of beta-CTF by gamma-secretase generates an Abeta and AICD fragment. The oligomerization and fibrillization of Abeta fragments lead to AD pathology. In some cases, amyloid precursor protein (APP) can be cut by a beta secretase (e.g., BACE1, cathepsin B or Meprin beta) or gamma secretase, and the fragment resulting from such cuts can be Abeta peptides of 36-43 amino acids. Certain Abeta peptide metabolites of this cleavage can be crucially involved in Alzheimer's disease pathology and progression.

[0385] In some embodiments, the present disclosure provides expression cassettes encoding engineered guide RNAs that target APP. The engineered guide RNAs may facilitate ADAR-mediated RNA editing of APP to correct G to A mutations by targeting adenosines for deamination. In some embodiments, the engineered guide RNAs of the present disclosure target a coding sequence in APP. For example, the coding sequence can be a translation initiation site (TIS) (AUG) of AUG, and the engineered guide RNA can facilitate ADAR-mediated RNA editing of AUG to GUG. Editing of the TIS may affect protein knockdown of APP. In another example, the guide RNA can facilitate ADAR-mediated correction of missense mutations in the coding sequence. Correcting a missense mutation may increase expression of functional AAP protein. In another example, the guide RNA can facilitate ADAR-mediated correction of nonsense mutations in the coding sequence. Correcting a nonsense mutation may increase expression of AAP protein.

[0386] In some embodiments, the engineered guide RNAs target a non-coding sequence in APP. The non-coding sequence can be a polyA signal sequence and the engineered guide RNA can facilitate ADAR-mediated RNA editing of one or more adenosines in the polyA signal sequence of APP. In some embodiments, engineered guide RNAs of the present disclosure can be multiplexed to target more than one polyA signal sequences in APP. In some embodiments, engineered guide RNAs of the present disclosure can be multiplexed to target the TIS and one or more polyA signal sequences in APP. In some embodiments, engineered guide RNAs can be multiplexed to target a non-coding sequence and a coding sequence in APP. The engineered guide RNAs of the present disclosure facilitated ADAR-mediated RNA editing of APP, thereby, affecting protein knockdown.

[0387] In some embodiments, the engineered guide RNAs of the present disclosure facilitated ADAR-mediated RNA editing of from 1 to 100% of a target adenosine in APP. The engineered guide RNAs of the present disclosure can facilitate from 40 to 90% editing of a target adenosine. In some embodiments, the engineered guide RNAs of the present disclosure can facilitate at least 5%, at least 10%, at least 15%, at least 20%, at least 25%, at least 30%, at least 35%, at least 40%, at least 45%, at least 50%, at least 55%, at least 60%, at least 65%, at least 70%, at least 75%, at least 80%, at least 85%, at least 90%, at least 95%, 100%, from 5 to 20%, from 20 to 40%, from 40 to 60%, from 60 to 80%, from 80 to 100%, from 60 to 80%, from 70 to 90%, or up to 90% or more RNA editing of a target adenosine. Optionally, additionally, the engineered guide RNAs of the present disclosure can facilitate these levels of on-target RNA editing while maintaining less than 10% editing of an off-target adenosine. Optionally, additionally, the engineered guide RNAs of the present disclosure can facilitate these levels of on-target RNA editing while maintaining less than less than 30%, less than 25%, less than 20%, less than 15%, less than 10%, less than 9%, less than 8%, less than 7%, less than 6%, less than 5%, less than 4%, less than 3%, less than 2%, less than 1%, or 0% editing of an off-target adenosine.

[0388] In some embodiments, the engineered guide RNAs of the present disclosure facilitate ADAR-mediated RNA editing of APP, which results in knockdown of protein levels. The knockdown in protein levels is quantitated as a reduction in expression of protein. The engineered guide RNAs of the present disclosure can facilitate from 1% to 100% protein knockdown. The engineered guide RNAs of the present disclosure can facilitate from 1% to 10%, from 10% to 20%, from 20% to 30%, from 30% to 40%, from 40% to 50%, from 50% to 60%, from 60% to 70%, from 70% to 80%, from 80% to 90%, from 90% to 100%, from 20% to 40%, from 30% to 50%, from 40% to 60%, from 50% to 70%, from 60% to 80%, from 20% to 50%, from 30% to 60%, at least 5%, at least 10%, at least 15%, at least 20%, at least 25%, at least 30%, at least 35%, at least 40%, at least 45%, at least 50%, at least 55%, at least 60%, at least 65%, at least 70%, at least 75%, at least 80%, at least 85%, or at least 90% protein knockdown. In some embodiments, the engineered guide RNAs of the present disclosure facilitate from 30% to 60% protein knockdown. Protein knockdown can be measured by an assay comparing a sample or subject treated with the engineered guide RNA to a control sample or subject not treated with the engineered guide RNA.

[0389] In some embodiments, the engineered guide RNAs of the present disclosure facilitate ADAR-mediated RNA editing of APP, which results in increased protein expression levels. The knockdown in protein levels is quantitated as an increase in expression of the target protein. The engineered guide RNAs of the present disclosure can facilitate from 1.1-fold to 1000-fold increased protein expression. The engineered guide RNAs of the present disclosure can facilitate from 1.1-fold to 1000-fold, from 1.5-fold to 1000-fold, from 2-fold to 1000-fold, from 5-fold to 1000-fold, from 10-fold to 1000-fold, from 20-fold to 1000-fold, from 50-fold to 1000-fold, from 100-fold to 1000-fold, from 200-fold to 1000-fold, from 500-fold to 1000-fold, from 1.1-fold to 10-fold, from 1.5-fold to 10-fold, from 2-fold to 10-fold, from 5-fold to 10-fold, from 10-fold to 100-fold, from 20-fold to 100-fold, or from 50-fold to 100-fold increased protein expression. In some embodiments, the engineered guide RNAs of the present disclosure facilitate at least 1.1-fold, at least 1.5-fold, at least 2-fold, at least 5-fold, at least 10-fold, at least 20-fold, at least 50-fold, at least 100-fold, at least 200-fold, or at least 500-fold increased expression. Increase in protein expression can be measured by an assay comparing a sample or subject treated with the engineered guide RNA to a control sample or subject not treated with the engineered guide RNA.

### SERPINA1

[0390] In some embodiments, the present disclosure provides expression cassettes encoding guide RNAs that are capable of facilitating RNA editing of serpin family A member 1 (SERPINA1). In some examples, the disease or condition can be an AAT deficiency or an associated lung or liver pathology (e.g., chronic obstructive pulmonary disease, cirrhosis, hepatocellular carcinoma) caused, at least in part, by a mutation in a SERPINA1 gene. In some examples, the mutation can be a substitution of a G with an A at nucleotide position 9989 within a wildtype SERPINA1 gene. In some examples, administration of the engineered guides disclosed herein restores expression of a normal AAT protein (e.g., as compared to an inactive or defective AAT protein) in a subject with an AAT deficiency. In some examples, a double stranded RNA (dsRNA) substrate (a guide-target RNA scaffold) is formed upon hybridization of an engineered guide of the present disclosure to a target RNA. In some examples, the target RNA forming the double stranded substrate comprises a portion of a mRNA or pre-mRNA molecule encoded by the SERPINA1 gene. In some examples the targeting region of the engineered guide forming the double stranded substrate is, at least in part, complementary to a portion of a mRNA or pre-mRNA molecule encoded by the SERPINA1 gene. In some examples the double stranded substrate comprises a single mismatch. In some examples, the engineered substrate additionally comprises one or two bulges. In some examples, the double stranded substrate can be formed by a target RNA comprising a mRNA or pre-mRNA encoded by the SERPINA1 gene and an engineered guide complementary to a portion of the mRNA encoded by the SERPINA1 gene, wherein the engineered substrate comprises a single mismatch. In some examples, the double stranded substrate can be formed by a target RNA comprising a mRNA or pre-mRNA encoded by the SERPINA1 gene and an engineered guide complementary to a portion of the mRNA or pre-mRNA encoded by the SERPINA1 gene, wherein the engineered substrate comprises a single mismatch, and wherein the engineered substrate comprises two additional bulges.

[0391] Guide RNAs can facilitate correction of a G to A mutation at nucleotide position 9989 of a SERPINA1 gene. In some embodiments, a guide RNA of the present disclosure can target, for example, E342K of SERPINA1. Said guide RNAs targeting a site in SERPINA1 can be encoded for by an engineered polynucleotide construct of the present disclosure.

[0392] In some embodiments, the present disclosure provides expression cassettes encoding engineered guide RNAs that target SERPINA1. The engineered guide RNAs may target SERPINA1 to modify or alter expression of SERPINA1. In some embodiments, targeting SERPINA1 with the engineered guide RNAs of the present disclosure may treat a disease associated with SERPINA1, such as alpha-1 antitrypsin deficiency. In some embodiments, the engineered guide RNAs may facilitate ADAR-mediated RNA editing of SERPINA1 to correct G to A mutations by targeting adenosines for deamination. The engineered guide RNAs of the present disclosure may target a coding sequence in SERPINA1. For example, the coding sequence can be a translation initiation site (TIS) (AUG) of AUG, and the engineered guide RNA can facilitate ADAR-mediated RNA editing of AUG to GUG. Editing of the TIS may affect protein knockdown of SERPINA1. In another example, the guide RNA can facilitate ADAR-mediated correction of missense mutations in the coding sequence. Correcting a missense mutation may increase expression of functional SERPINA1 protein. In another example, the guide RNA can facilitate ADAR-mediated correction of nonsense mutations in the coding sequence. Correcting a nonsense mutation may increase expression of SERPINA1 protein.

[0393] In some embodiments, the engineered guide RNAs target a non-coding sequence in SERPINA1. The non-coding sequence can be a polyA signal sequence and the engineered guide RNA can facilitate ADAR-mediated RNA editing of one or more adenosines in the polyA signal sequence of SERPINA1. In some embodiments, engineered guide RNAs of the present disclosure can be multiplexed to target more than one polyA signal sequences in SERPINA1. In some embodiments, engineered guide RNAs of the present disclosure can be multiplexed to target the TIS and one or more polyA signal sequences in SERPINA1. In some embodiments, engineered guide RNAs can be multiplexed to target a non-coding sequence and a coding sequence in SERPINA1. The engineered guide RNAs of the present disclosure facilitated ADAR-mediated RNA editing of SERPINA1, thereby, affecting protein knockdown.

[0394] In some embodiments, the engineered guide RNAs of the present disclosure facilitated ADAR-mediated RNA editing of from 1 to 100% of a target adenosine in SERPINA1. The engineered guide RNAs of the present disclosure can facilitate from 40 to 90% editing of a target adenosine. In some embodiments, the engineered guide RNAs of the present disclosure can facilitate at least 5%, at least 10%, at least 15%, at least 20%, at least 25%, at least 30%, at least 35%, at least 40%, at least 45%, at least 50%, at least 55%, at least 60%, at least 65%, at least 70%, at least 75%, at least 80%, at least 85%, at least 90%, at least 95%, 100%, from 5 to 20%, from 20 to 40%, from 40 to 60%, from 60 to 80%, from 80 to 100%, from 60 to 80%, from 70 to 90%, or up to 90% or more RNA editing of a target adenosine. Optionally, additionally, the engineered guide RNAs of the present disclosure can facilitate these levels of on-target RNA editing while maintaining less than 10% editing of an off-target adenosine. Optionally, additionally, the engineered guide RNAs of the present disclosure can facilitate these levels of on-target RNA editing while maintaining less than less than 30%, less than 25%, less than 20%, less than 15%, less than 10%, less than 9%, less than 8%, less than 7%, less than 6%, less than 5%, less than 4%, less than 3%, less than 2%, less than 1%, or 0% editing of an off-target adenosine.

[0395] In some embodiments, the engineered guide RNAs of the present disclosure facilitate ADAR-mediated RNA editing of SERPINA1, which results in knockdown of protein levels. The knockdown in protein levels is quantitated as a reduction in expression of protein. The engineered guide RNAs of the present disclosure can facilitate from 1% to 100% protein knockdown. The engineered guide RNAs of the present disclosure can facilitate from 1% to 10%, from 10% to 20%, from 20% to 30%, from 30% to 40%, from 40% to 50%, from 50% to 60%, from 60% to 70%, from 70% to 80%, from 80% to 90%, from 90% to 100%, from 20% to 40%, from 30% to 50%, from 40% to 60%, from 50% to 70%, from 60% to 80%, from 20% to 50%, from 30% to 60%, at least 5%, at least 10%, at least 15%, at least 20%, at least 25%, at least 30%, at least 35%, at least 40%, at least 45%, at least 50%, at least 55%, at least 60%, at least 65%, at least 70%, at least 75%, at least 80%, at least 85%, or at least 90% protein knockdown. In some embodiments, the engineered guide RNAs of the present disclosure facilitate from 30% to 60% protein knockdown. Protein knockdown can be measured by an assay comparing a sample or subject treated with the engineered guide RNA to a control sample or subject not treated with the engineered guide RNA.

[0396] In some embodiments, the engineered guide RNAs of the present disclosure facilitate ADAR-mediated RNA editing of SERPINA1, which results in increased protein expression levels. The knockdown in protein levels is quantitated as an increase in expression of the target protein. The engineered guide RNAs of the present disclosure can facilitate from 1.1-fold to 1000-fold increased protein expression. The engineered guide RNAs of the present disclosure can facilitate from 1.1-fold to 1000-fold, from 1.5-fold to 1000-fold, from 2-fold to 1000-fold, from 5-fold to 1000-fold, from 10-fold to 1000-fold, from 20-fold to 1000-fold, from 50-fold to 1000-fold, from 100-fold to 1000-fold, from 200-fold to 1000-fold, from 500-fold to 1000-fold, from 1.1-fold to 10-fold, from 1.5-fold to 10-fold, from 2-fold to 10-fold, from 5-fold to 10-fold, from 10-fold to 100-fold, from 20-fold to 100-fold, or from 50-fold to 100-fold increased protein expression. In some embodiments, the engineered guide RNAs of the present disclosure facilitate at least 1.1-fold, at least 1.5-fold, at least 2-fold, at least 5-fold, at least 10-fold, at least 20-fold, at least 50-fold, at least 100-fold, at least 200-fold, or at least 500-fold increased expression. Increase in protein expression can be measured by an assay comparing a sample or subject treated with the engineered guide RNA to a control sample or subject not treated with the engineered guide RNA.

### Recombinant Vectors and Delivery

[0397] In some embodiments, an expression cassette (e.g., encoding a small RNA payload, such as an engineered guide RNA) of the present disclosure is introduced into a subject via a delivery vehicle. In some embodiments, the delivery vehicle is a vector. In some embodiments the vector is a plasmid, a viral vector, an expression cassette, or a transformed cell. A vector can facilitate delivery of the engineered polynucleotide into a cell to genetically modify the cell. In some examples, the vector comprises DNA, such as double stranded or single stranded DNA. In some examples, the delivery vector can be a eukaryotic vector, a prokaryotic vector (e.g., a bacterial vector or plasmid), a viral vector, or any combination thereof. In some embodiments, the vector is an expression cassette. In some embodiments, a viral vector comprises a viral capsid, an inverted terminal repeat sequence, and the engineered polynucleotide can be used to deliver the small RNA payload to a cell.

[0398] In some embodiments, a vector may comprise multiple expression cassettes of the present disclosure. An expression cassette may comprise a promoter, a payload sequence (e.g., encoding a small RNA payload, such as an engineered guide RNA), and a termination sequence. In some embodiments, a vector may comprise one or more expression cassettes. In some embodiments, a vector may comprise two or more expression cassettes. In some embodiments, a vector may comprise three or more expression cassettes. In some embodiments, a vector may comprise four or more expression cassettes. A vector comprising multiple expression cassettes may include one or more promoters, one or more payload sequences, and one or more termination sequences. In some embodiments, a vector comprising multiple expression cassettes may comprises one or more promoters (e.g., one or more of SEQ ID NO: 13-SEQ ID NO: 17, SEQ ID NO: 167-SEQ ID NO: 707, SEQ ID NO: 1241, SEQ ID NO: 1248-SEQ ID NO: 1253, or SEQ ID NO: 1259-SEQ ID NO: 1263), one or more payload sequences, and one or more termination sequences (e.g., one or more of SEQ ID NO: 60, SEQ ID NO: 708-SEQ ID NO: 1240, SEQ ID NO: 1242, SEQ ID NO: 1243-SEQ ID NO: 1247, SEQ ID NO: 1254-SEQ ID NO: 1257, SEQ ID NO: 1264-SEQ ID NO: 1272, SEQ ID NO: 1275, or SEQ ID NO: 1287-SEQ ID NO: 1289). In some embodiments, a vector comprising two or more expression cassettes may comprise two or more promoters (e.g., two or more of SEQ ID NO: 13-SEQ ID NO: 17, SEQ ID NO: 167-SEQ ID NO: 707, SEQ ID NO: 1241, SEQ ID NO: 1248-SEQ ID NO: 1253, or SEQ ID NO: 1259-SEQ ID NO: 1263). In some embodiments, the two or more promoters may have different sequences. In some embodiments, the two or more promoters may have the same sequence. In some embodiments, a vector comprising two or more expression cassettes may comprise two or more termination sequences (e.g., two or more of SEQ ID NO: 60, SEQ ID NO: 708-SEQ ID NO: 1240, SEQ ID NO: 1242, SEQ ID NO: 1243-SEQ ID NO: 1247, SEQ ID NO: 1254-SEQ ID NO: 1257, SEQ ID NO: 1264-SEQ ID NO: 1272, SEQ ID NO: 1275, or SEQ ID NO: 1287-SEQ ID NO: 1289). In some embodiments, the two or more termination sequences may have different sequences. In some embodiments, the two or more termination sequences may have the same sequence. In some embodiments, the present disclosure provides for an AAV vector comprising two expression cassettes, where a first expression cassette comprises a first promoter sequence (e.g., one or more of SEQ ID NO: 13-SEQ ID NO: 17, SEQ ID NO: 167-SEQ ID NO: 707, SEQ ID NO: 1241, SEQ ID NO: 1248-SEQ ID NO: 1253, or SEQ ID NO: 1259-SEQ ID NO: 1263) and a first termination sequence (e.g., one or more of SEQ ID NO: 60, SEQ ID NO: 708-SEQ ID NO: 1240, SEQ ID NO: 1242, SEQ ID NO: 1243-SEQ ID NO: 1247, SEQ ID NO: 1254-SEQ ID NO: 1257, SEQ ID NO: 1264-SEQ ID NO: 1272, SEQ ID NO: 1275, or SEQ ID NO: 1287-SEQ ID NO: 1289) and where the second expression cassette comprises a second promoter sequence different from the first promoter sequence (e.g., one or more of SEQ ID NO: 13-SEQ ID NO: 17, SEQ ID NO: 167-SEQ ID NO: 707, SEQ ID NO: 1241, SEQ ID NO: 1248-SEQ ID NO: 1253, or SEQ ID NO: 1259-SEQ ID NO: 1263) and a second termination sequence different from the first termination sequence (e.g., one or more of SEQ ID NO: 60, SEQ ID NO: 708-SEQ ID NO: 1240, SEQ ID NO: 1242, SEQ ID NO: 1243-SEQ ID NO: 1247, SEQ ID NO: 1254-SEQ ID NO: 1257, SEQ ID NO: 1264-SEQ ID NO: 1272, SEQ ID NO: 1275, or SEQ ID NO: 1287-SEQ ID NO: 1289). For example, a vector comprising two or more expression cassettes may have a first promoter sequence of SEQ ID NO: 17, a first termination sequence of SEQ ID NO: 1264, a second promoter sequence of SEQ ID NO: 1262, and a second termination sequence of SEQ ID NO: 1265.

[0399] In some embodiments, the viral vector can be a retroviral vector, an adenoviral vector, an adeno-associated viral (AAV) vector, an alphavirus vector, a lentivirus vector (e.g., human or porcine), a Herpes virus vector, an Epstein-Barr virus vector, an SV40 virus vectors, a pox virus vector, or a combination thereof. In some embodiments, the viral vector can be a recombinant vector, a hybrid vector, a chimeric vector, a self-complementary vector, a single-stranded vector, or any combination thereof.

[0400] In some embodiments, the viral vector is an adenoviral vector, an adeno-associated viral vector, or a lentiviral vector. Adeno-associated virus (AAV) vectors include vectors derived from any AAV serotype, including, but not limited to AAV1, AAV2, AAV3, AAV4, AAV5, AAV6, AAV7, AAV8, AAV9, AAV 10, AAV11, AAV12, AAV13, AAV14, AAV15, AAV16, AAV-DJ, AAV-DJ/8, AAV-DJ/9, AAV1/2, AAV.rh8, AAV.rh10, AAV.rh20, AAV.rh39, AAV.Rh43, AAV.Rh74, AAV.v66, AAV.Oligo001, AAV.SCH9, AAV.r3.45, AAV.RHM4-1, AAV.hu37, AAV.Anc80, AAV.Anc80L65, AAV.7m8, AAV.PhP.eB, AAV.PhP.V1, AAV.PHP.B, AAV.PhB.C1, AAV.PhB.C2, AAV.PhB.C3, AAV.PhB.C6, AAV.cy5, AAV2.5, AAV2tYF, AAV3B, AAV.LK03, AAV.HSC1, AAV.HSC2, AAV.HSC3, AAV.HSC4, AAV.HSC5, AAV.HSC6, AAV.HSC7, AAV.HSC8, AAV.HSC9, AAV.HSC10, AAV.HSC11, AAV.HSC12, AAV.HSC13, AAV.HSC14, AAV.HSC15, AAV.HSC16, AAV.HSC17, and AAVhu68.

[0401] In some embodiments, a polynucleotide is introduced into a subject by non-viral vector systems. In some embodiments, cationic lipids, polymers, hydrodynamic injection and/or ultrasound may be used in delivering a polynucleotide to a subject in the absence of virus.

[0402] In some examples, the vector may be a eukaryotic vector, a prokaryotic vector (e.g., a bacterial vector) a viral vector, or any combination thereof. In some examples, the vector may be a viral vector. In some embodiments, the viral vector may be a retroviral vector, an adenoviral vector, an adeno-associated viral (AAV) vector, an alphavirus vector, a lentivirus vector (e.g., human or porcine), a Herpes virus vector, an Epstein-Barr virus vector, an SV40 virus vectors, a pox virus vector, or a combination thereof. In some embodiments, the viral vector may be a recombinant vector, a hybrid vector, a chimeric vector, a self-complementary vector, a single-stranded vector, or any combination thereof.

[0403] In some embodiments, the viral vector may be an adeno-associated virus (AAV). In some embodiments, the AAV may be any AAV known in the art. In some embodiments, the viral vector may be of a specific serotype. In some embodiments, the viral vector may be an AAV1 serotype, AAV2 serotype, AAV3 serotype, AAV4 serotype, AAV5 serotype, AAV6 serotype, AAV7 serotype, AAV8 serotype, AAV9 serotype, AAV10 serotype, AAV 11 serotype, AAV 12 serotype, AAV13 serotype, AAV14 serotype, AAV15 serotype, AAV16 serotype, AAV-DJ serotype, AAV-DJ/8 serotype, AAV-DJ/9 serotype, AAV1/2 serotype, AAV.rh8 serotype, AAV.rh10 serotype, AAV.rh20 serotype, AAV.rh39 serotype, AAV.Rh43 serotype, AAV.Rh74 serotype, AAV.v66 serotype, AAV.Oligo001 serotype, AAV.SCH9 serotype, AAV.r3.45 serotype, AAV.RHM4-1 serotype, AAV.hu37 serotype, AAV.Anc80 serotype, AAV.Anc80L65 serotype, AAV.7m8 serotype, AAV.PhP.eB serotype, AAV.PhP.V1 serotype, AAV.PHP.B serotype, AAV.PhB.C1 serotype, AAV.PhB.C2 serotype, AAV.PhB.C3 serotype, AAV.PhB.C6 serotype, AAV.cy5 serotype, AAV2.5 serotype, AAV2tYF serotype, AAV3B serotype, AAV.LK03 serotype, AAV.HSC1 serotype, AAV.HSC2 serotype, AAV.HSC3 serotype, AAV.HSC4 serotype, AAV.HSC5 serotype, AAV.HSC6 serotype, AAV.HSC7 serotype, AAV.HSC8 serotype, AAV.HSC9 serotype, AAV.HSC10 serotype, AAV.HSC11 serotype, AAV.HSC12 serotype, AAV.HSC13 serotype, AAV.HSC14 serotype, AAV.HSC15 serotype, AAV.HSC16 serotype, AAV.HSC17 serotype, or AAVhu68 serotype, a derivative of any of these serotypes, or any combination thereof.

[0404] In some embodiments, the AAV vector may be a recombinant vector, a hybrid AAV vector, a chimeric AAV vector, a self-complementary AAV (scAAV) vector, a single-stranded AAV, or any combination thereof.

[0405] In some embodiments, the AAV vector may be a recombinant AAV (rAAV) vector. Methods of producing recombinant AAV vectors may be known in the art and generally involve, in some cases, introducing into a producer cell line: (1) DNA necessary for AAV replication and synthesis of an AAV capsid, (b) one or more helper constructs comprising the viral functions missing from the AAV vector, (c) a helper virus, and (d) the plasmid construct containing the genome of the AAV vector, e.g., ITRs, promoter and payload sequences, etc. In some examples, the viral vectors described herein may be engineered through synthetic or other suitable means by references to published sequences, such as those that may be available in the literature. For example, the genomic and protein sequences of various serotypes of AAV, as well as the sequences of the native terminal repeats (TRs), Rep proteins, and capsid subunits may be known in the art and may be found in the literature or in public databases such as GenBank or Protein Data Bank (PDB).

[0406] In some examples, methods of producing delivery vectors herein comprising packaging a polynucleotide of the present disclosure in an AAV vector. In some examples, methods of producing the delivery vectors described herein comprise, (a) introducing into a cell: (i) a polynucleotide disclosed herein; and (ii) a viral genome comprising a Replication (Rep) gene and Capsid (Cap) gene that encodes a wild type AAV capsid protein or modified version thereof; (b) expressing in the cell the wild type AAV capsid protein or modified version thereof; (c) assembling an AAV particle; and (d) packaging the polynucleotide disclosed herein in the AAV particle, thereby generating an AAV delivery vector. In some examples, any polynucleotide disclosed herein may be packaged in the AAV vector. In some examples, the recombinant vectors comprise one or more inverted terminal repeats and the inverted terminal repeats comprise a 5′ inverted terminal repeat, a 3′ inverted terminal repeat, and a mutated inverted terminal repeat. In some examples, the mutated terminal repeat lacks a terminal resolution site, thereby enabling formation of a self-complementary AAV.

[0407] In some examples, a hybrid AAV vector may be produced by transcapsidation, e.g., packaging an inverted terminal repeat (ITR) from a first serotype into a capsid of a second serotype, wherein the first and second serotypes may be not the same. In some examples, the Rep gene and ITR from a first AAV serotype (e.g., AAV2) may be used in a capsid from a second AAV serotype (e.g., AAV5 or AAV9), wherein the first and second AAV serotypes may not be the same. As a non-limiting example, a hybrid AAV serotype comprising the AAV2 ITRs and AAV9 capsid protein may be indicated AAV2/9. In some examples, the hybrid AAV delivery vector comprises an AAV2/1, AAV2/2, AAV 2/4, AAV2/5, AAV2/8, or AAV2/9 vector.

[0408] In some examples, the AAV vector may be a chimeric AAV vector. In some examples, the chimeric AAV vector comprises an exogenous amino acid or an amino acid substitution, or capsid proteins from two or more serotypes. In some examples, a chimeric AAV vector may be genetically engineered to increase transduction efficiency, selectivity, or a combination thereof.

[0409] In some examples, the AAV vector comprises a self-complementary AAV genome. Self-complementary AAV genomes may be generally known in the art and contain both DNA strands which can anneal together to form double-stranded DNA.

[0410] In some examples, the delivery vector may be a retroviral vector. In some examples, the retroviral vector may be a Moloney Murine Leukemia Virus vector, a spleen necrosis virus vector, or a vector derived from the Rous Sarcoma Virus, Harvey Sarcoma Virus, avian leukosis virus, human immunodeficiency virus, myeloproliferative sarcoma virus, or mammary tumor virus, or a combination thereof. In some examples, the retroviral vector may be transfected such that the majority of sequences coding for the structural genes of the virus (e.g., gag, pol, and env) may be deleted and replaced by the gene(s) of interest.

[0411] In some examples, the delivery vehicle may be a non-viral vector. Examples of non-viral vectors may include plasmids, lipid nanoparticles, lipoplexes, polymersomes, polyplexes, dendrimers, nanoparticles, and cell-penetrating peptides. The non-viral vector may comprise a polynucleotide, such as a plasmid, encoding for a promoter (e.g., comprising a cell type- or cell state-specific response element and a switchable core promoter) and a payload sequence. In some examples, the delivery vehicle may be a plasmid. In some examples, the plasmid may be a minicircle plasmid. In some embodiments, a vector may comprise naked DNA (e.g., a naked DNA plasmid). In some embodiments, the non-viral vector comprises DNA. In some embodiments, the non-viral vector comprises RNA. In some examples, the non-viral vector comprises circular double-stranded DNA. In some examples, the non-viral vector may comprise a linear polynucleotide. In some examples, the non-viral vector comprises a polynucleotide encoding one or more genes of interest and one or more regulatory elements. In some examples, the non-viral vector comprises a bacterial backbone containing an origin of replication and an antibiotic resistance gene or other selectable marker for plasmid amplification in bacteria. In some examples, the non-viral vector contains one or more genes that provide a selective marker to induce a target cell to retain a polynucleotide (e.g., a plasmid) of the non-viral vector. In some examples, the non-viral vector may be formulated for delivery through injection by a needle carrying syringe. In some examples, the non-viral vector may be formulated for delivery via electroporation. In some examples, a polynucleotide of the non-viral vector may be engineered through synthetic or other suitable means known in the art. For example, in some cases, the genetic elements may be assembled by restriction digest of the desired genetic sequence from a donor plasmid or organism to produce ends of the DNA which may then be readily ligated to another genetic sequence.

[0412] In some embodiments, the vector containing the expression cassette is a non-viral vector system. In some embodiments, the non-viral vector system comprises cationic lipids, or polymers. For example, the non-viral vector system comprises can be a liposome or polymeric nanoparticle. In some embodiments, the small RNA payload or a non-viral vector comprising the small RNA payload is delivered to a cell by hydrodynamic injection or ultrasound.

### Pharmaceutical Compositions

[0413] Methods for treatment of diseases or disorders characterized by genetic mutations or aberrant gene expression are also encompassed by the present disclosure. Said methods include administering a therapeutically effective amount of a payload sequence as part of a recombinant polynucleotide cassette. The recombinant polynucleotide cassette of the disclosure can be formulated in pharmaceutical compositions. These compositions can comprise, in addition to one or more of the recombinant polynucleotide cassettes, a pharmaceutically acceptable excipient, carrier, buffer, stabilizer or other materials well known to those skilled in the art. Such materials should be non-toxic and should not interfere with the efficacy of the active ingredient. The precise nature of the carrier or other material can depend on the route of administration, e.g., oral, intravenous, cutaneous or subcutaneous, nasal, intramuscular, intraperitoneal routes.

[0414] The compositions described herein (e.g., compositions comprising an engineered guide RNA or an engineered polynucleotide) can be formulated with a pharmaceutically acceptable carrier for administration to a subject (e.g., a human or a non-human animal). A pharmaceutically acceptable carrier can include, but is not limited to, phosphate buffered saline solution, water, emulsions (e.g., an oil/water emulsion or a water/oil emulsions), glycerol, liquid polyethylene glycols, aprotic solvents such (e.g., dimethylsulfoxide, N-methylpyrrolidone, or mixtures thereof), and various types of wetting agents, solubilizing agents, anti-oxidants, bulking agents, protein carriers such as albumins, any and all solvents, dispersion media, coatings, sodium lauryl sulfate, isotonic and absorption delaying agents, disintegrants (e.g., potato starch or sodium starch glycolate), and the like. The compositions also can include stabilizers and preservatives. Additional examples of carriers, stabilizers, and adjuvants consistent with the compositions of the present disclosure can be found in, for example, Remington's Pharmaceutical Sciences, 21st Ed., Mack Publ. Co., Easton, Pa. (2005), incorporated herein by reference in its entirety.

[0415] In some examples, the pharmaceutical composition can be formulated in unit dose forms or multiple-dose forms. In some examples, the unit dose forms can be physically discrete units suitable for administration to human or non-human subjects (e.g., animals). In some examples, the unit dose forms can be packaged individually. In some examples, each unit dose contains a predetermined quantity of an active ingredient(s) that can be sufficient to produce the desired therapeutic effect in association with pharmaceutical carriers, diluents, excipients, or any combination thereof. In some examples, the unit dose forms comprise ampules, syringes, or individually packaged tablets and capsules, or any combination thereof. In some instances, a unit dose form can be comprised in a disposable syringe. In some instances, unit-dosage forms can be administered in fractions or multiples thereof. In some examples, a multiple-dose form comprises a plurality of identical unit dose forms packaged in a single container, which can be administered in segregated a unit dose form. In some examples, multiple dose forms comprise vials, bottles of tablets or capsules, or bottles of pints or gallons. In some instances, a multiple-dose forms comprise the same pharmaceutically active agents. In some instances, a multiple-dose forms comprise different pharmaceutically active agents.

[0416] In some examples, the pharmaceutical composition comprises a pharmaceutically acceptable excipient. In some examples, the excipient comprises a buffering agent, a cryopreservative, a preservative, a stabilizer, a binder, a compaction agent, a lubricant, a chelator, a dispersion enhancer, a disintegration agent, a flavoring agent, a sweetener, or a coloring agent, or any combination thereof.

[0417] In some examples, an excipient comprises a buffering agent. In some examples, the buffering agent comprises sodium citrate, magnesium carbonate, magnesium bicarbonate, calcium carbonate, calcium bicarbonate, or any combination thereof. In some examples, the buffering agent comprises sodium bicarbonate, potassium bicarbonate, magnesium hydroxide, magnesium lactate, magnesium glucomate, aluminum hydroxide, sodium citrate, sodium tartrate, sodium acetate, sodium carbonate, sodium polyphosphate, potassium polyphosphate, sodium pyrophosphate, potassium pyrophosphate, disodium hydrogen phosphate, dipotassium hydrogen phosphate, trisodium phosphate, tripotassium phosphate, potassium metaphosphate, magnesium oxide, magnesium hydroxide, magnesium carbonate, magnesium silicate, calcium acetate, calcium glycerophosphate, calcium chloride, or calcium hydroxide and other calcium salts, or any combination thereof.

[0418] In some examples, an excipient comprises a cryopreservative. In some examples, the cryopreservative comprises DMSO, glycerol, polyvinylpyrrolidone (PVP), or any combination thereof. In some examples, a cryopreservative comprises a sucrose, a trehalose, a starch, a salt of any of these, a derivative of any of these, or any combination thereof. In some examples, an excipient comprises a pH agent (to minimize oxidation or degradation of a component of the composition), a stabilizing agent (to prevent modification or degradation of a component of the composition), a buffering agent (to enhance temperature stability), a solubilizing agent (to increase protein solubility), or any combination thereof. In some examples, an excipient comprises a surfactant, a sugar, an amino acid, an antioxidant, a salt, a non-ionic surfactant, a solubilizer, a triglyceride, an alcohol, or any combination thereof. In some examples, an excipient comprises sodium carbonate, acetate, citrate, phosphate, poly-ethylene glycol (PEG), human serum albumin (HSA), sorbitol, sucrose, trehalose, polysorbate 80, sodium phosphate, sucrose, disodium phosphate, mannitol, polysorbate 20, histidine, citrate, albumin, sodium hydroxide, glycine, sodium citrate, trehalose, arginine, sodium acetate, acetate, HCl, disodium edetate, lecithin, glycerin, xanthan rubber, soy isoflavones, polysorbate 80, ethyl alcohol, water, teprenone, or any combination thereof. In some examples, the excipient can be an excipient described in the Handbook of Pharmaceutical Excipients, American Pharmaceutical Association (1986).

[0419] In some examples, the excipient comprises a preservative. In some examples, the preservative comprises an antioxidant, such as alpha-tocopherol and ascorbate, an antimicrobial, such as parabens, chlorobutanol, and phenol, or any combination thereof. In some examples, the antioxidant comprises EDTA, citric acid, ascorbic acid, butylated hydroxytoluene (BHT), butylated hydroxy anisole (BHA), sodium sulfite, p-amino benzoic acid, glutathione, propyl gallate, cysteine, methionine, ethanol or N-acetyl cysteine, or any combination thereof. In some examples, the preservative comprises validamycin A, TL-3, sodium ortho vanadate, sodium fluoride, N-α-tosyl-Phe-chloromethylketone, N-α-tosyl-Lys-chloromethylketone, aprotinin, phenylmethylsulfonyl fluoride, diisopropylfluorophosphate, kinase inhibitor, phosphatase inhibitor, caspase inhibitor, granzyme inhibitor, cell adhesion inhibitor, cell division inhibitor, cell cycle inhibitor, lipid signaling inhibitor, protease inhibitor, reducing agent, alkylating agent, antimicrobial agent, oxidase inhibitor, or other inhibitors, or any combination thereof.

[0420] In some examples, the excipient comprises a binder. In some examples, the binder comprises starches, pregelatinized starches, gelatin, polyvinylpyrolidone, cellulose, methylcellulose, sodium carboxymethylcellulose, ethylcellulose, polyacrylamides, polyvinyloxoazolidone, polyvinylalcohols, C12-C18 fatty acid alcohol, polyethylene glycol, polyols, saccharides, oligosaccharides, or any combination thereof.

[0421] In some examples, the binder can be a starch, for example a potato starch, corn starch, or wheat starch; a sugar such as sucrose, glucose, dextrose, lactose, or maltodextrin; a natural and/or synthetic gum; a gelatin; a cellulose derivative such as microcrystalline cellulose, hydroxypropyl cellulose, hydroxyethyl cellulose, hydroxypropyl methyl cellulose, carboxymethyl cellulose, methyl cellulose, or ethyl cellulose; polyvinylpyrrolidone (povidone); polyethylene glycol (PEG); a wax; calcium carbonate; calcium phosphate; an alcohol such as sorbitol, xylitol, mannitol, or water, or any combination thereof.

[0422] In some examples, the excipient comprises a lubricant. In some examples, the lubricant comprises magnesium stearate, calcium stearate, zinc stearate, hydrogenated vegetable oils, sterotex, polyoxyethylene monostearate, talc, polyethyleneglycol, sodium benzoate, sodium lauryl sulfate, magnesium lauryl sulfate, or light mineral oil, or any combination thereof. In some examples, the lubricant comprises metallic stearates (such as magnesium stearate, calcium stearate, aluminum stearate), fatty acid esters (such as sodium stearyl fumarate), fatty acids (such as stearic acid), fatty alcohols, glyceryl behenate, mineral oil, paraffins, hydrogenated vegetable oils, leucine, polyethylene glycols (PEG), metallic lauryl sulphates (such as sodium lauryl sulphate, magnesium lauryl sulphate), sodium chloride, sodium benzoate, sodium acetate or talc or a combination thereof.

[0423] In some examples, the excipient comprises a dispersion enhancer. In some examples, the dispersion enhancer comprises starch, alginic acid, polyvinylpyrrolidones, guar gum, kaolin, bentonite, purified wood cellulose, sodium starch glycolate, isomorphous silicate, or microcrystalline cellulose, or any combination thereof as high HLB emulsifier surfactants.

[0424] In some examples, the excipient comprises a disintegrant. In some examples, a disintegrant comprises a non-effervescent disintegrant. In some examples, a non-effervescent disintegrants comprises starches such as corn starch, potato starch, pregelatinized and modified starches thereof, sweeteners, clays, such as bentonite, micro-crystalline cellulose, alginates, sodium starch glycolate, or gums such as agar, guar, locust bean, karaya, pectin, and tragacanth, or any combination thereof. In some examples, a disintegrant comprises an effervescent disintegrant. In some examples, a suitable effervescent disintegrant comprises bicarbonate in combination with citric acid, and sodium bicarbonate in combination with tartaric acid.

[0425] In some examples, the excipient comprises a sweetener, a flavoring agent or both. In some examples, a sweetener comprises glucose (corn syrup), dextrose, invert sugar, fructose, and mixtures thereof (when not used as a carrier); saccharin and its various salts such as a sodium salt; dipeptide sweeteners such as aspartame; dihydrochalcone compounds, glycyrrhizin; Stevia Rebaudiana (Stevioside); chloro derivatives of sucrose such as sucralose; and sugar alcohols such as sorbitol, mannitol, sylitol, and the like, or any combination thereof. In some cases, flavoring agents incorporated into a composition comprise synthetic flavor oils and flavoring aromatics; natural oils; extracts from plants, leaves, flowers, and fruits; or any combination thereof. In some embodiments, a flavoring agent comprises a cinnamon oil; oil of wintergreen; peppermint oils; clover oil; hay oil; anise oil; eucalyptus; vanilla; citrus oil such as lemon oil, orange oil, grape and grapefruit oil; and fruit essences including apple, peach, pear, strawberry, raspberry, cherry, plum, pineapple, and apricot, or any combination thereof.

[0426] In some examples, the excipient comprises a pH agent (e.g., to minimize oxidation or degradation of a component of the composition), a stabilizing agent (e.g., to prevent modification or degradation of a component of the composition), a buffering agent (e.g., to enhance temperature stability), a solubilizing agent (e.g., to increase protein solubility), or any combination thereof. In some examples, the excipient comprises a surfactant, a sugar, an amino acid, an antioxidant, a salt, a non-ionic surfactant, a solubilizer, a trigylceride, an alcohol, or any combination thereof. In some examples, the excipient comprises sodium carbonate, acetate, citrate, phosphate, poly-ethylene glycol (PEG), human serum albumin (HSA), sorbitol, sucrose, trehalose, polysorbate 80, sodium phosphate, sucrose, disodium phosphate, mannitol, polysorbate 20, histidine, citrate, albumin, sodium hydroxide, glycine, sodium citrate, trehalose, arginine, sodium acetate, acetate, HCl, disodium edetate, lecithin, glycerine, xanthan rubber, soy isoflavones, polysorbate 80, ethyl alcohol, water, teprenone, or any combination thereof. In some examples, the excipient comprises a cryo-preservative. In some examples, the excipient comprises DMSO, glycerol, polyvinylpyrrolidone (PVP), or any combination thereof. In some examples, the excipient comprises a sucrose, a trehalose, a starch, a salt of any of these, a derivative of any of these, or any combination thereof.

[0427] In some examples, the pharmaceutical composition comprises a diluent. In some examples, the diluent comprises water, glycerol, methanol, ethanol, or other similar biocompatible diluents, or any combination thereof. In some examples, a diluent comprises an aqueous acid such as acetic acid, citric acid, maleic acid, hydrochloric acid, phosphoric acid, nitric acid, sulfuric acid, or any combination thereof. In some examples, a diluent comprises an alkaline metal carbonates such as calcium carbonate; alkaline metal phosphates such as calcium phosphate; alkaline metal sulphates such as calcium sulphate; cellulose derivatives such as cellulose, microcrystalline cellulose, cellulose acetate; magnesium oxide, dextrin, fructose, dextrose, glyceryl palmitostearate, lactitol, choline, lactose, maltose, mannitol, simethicone, sorbitol, starch, pregelatinized starch, talc, xylitol and/or anhydrates, hydrates and/or pharmaceutically acceptable derivatives thereof or combinations thereof.

[0428] In some examples, the pharmaceutical composition comprises a carrier. In some examples, the carrier comprises a liquid or solid filler, solvent, or encapsulating material. In some examples, the carrier comprises additives proteins, peptides, amino acids, lipids, and carbohydrates (e.g., sugars, including monosaccharides, di-, tri-, tetra-oligosaccharides, and oligosaccharides; derivatized sugars such as alditols, aldolic acids, esterified sugars and the like; and polysaccharides or sugar polymers), alone or in combination.

### Administration

[0429] Administration can refer to methods that can be used to enable the delivery of a composition described herein (e.g., comprising an engineered guide RNA or an engineered polynucleotide encoding the same) to the desired site of biological action. For example, an engineered guide RNA or an expression cassette can be comprised in a DNA construct, a viral vector, or both and be administered by intravenous administration. Administration disclosed herein to an area in need of treatment or therapy can be achieved by, for example, and not by way of limitation, oral administration, topical administration, intravenous administration, inhalation administration, or any combination thereof. In some embodiments, delivery can include inhalation, otic, buccal, conjunctival, dental, endocervical, endosinusial, endotracheal, enteral, epidural, extra-amniotic, extracorporeal, hemodialysis, infiltration, interstitial, intraabdominal, intraamniotic, intraarterial, intraarticular, intrabiliary, intrabronchial, intrabursal, intracardiac, intracartilaginous, intracaudal, intracavernous, intracavitary, intracerebroventricular, intracisternal, intracorneal, intracoronal, intracoronary, intracorpous cavernaosum, intradermal, intradiscal, intraductal, intraduodenal, intradural, intraepidermal, intraesophageal, intragastric, intragingival, intrahippocampal, intraileal, intralesional, intraluminal, intralymphatic, intramedullary, intrameningeal, intramuscular, intraocular, intraovarian, intrapericardial, intraperitoneal, intrapleural, intraprostatic, intrapulmonary, intrasinal, intraspinal, intrasynovial, intratendinous, intratesticular, intrathoracic, intratubular, intratumor, intratympanic, intrauterine, intravascular, intravenous, intravenous bolus, intravenous drip, intravesical, intravitreal, iontophoresis, irrigation, laryngeal, nasal, nasogastric, ophthalmic, oral, oropharyngeal, parenteral, percutaneous, periarticular, peridural, perineural, periodontal, rectal, retrobulbar, subarachnoid, subconjunctival, subcutaneous, sublingual, submucosal, topical, transdermal, transmucosal, transplacental, transtracheal, transtympanic, ureteral, urethral, vaginal, infraorbital, intraparenchymal, intrathecal, intraventricular, stereotactic, or any combination thereof. Delivery can include parenteral administration (including intravenous, subcutaneous, intrathecal, intraperitoneal, intramuscular, intravascular or infusion), oral administration, inhalation administration, intraduodenal administration, rectal administration, or a combination thereof. Delivery can include direct application to the affected tissue or region of the body. In some cases, topical administration can comprise administering a lotion, a solution, an emulsion, a cream, a balm, an oil, a paste, a stick, an aerosol, a foam, a jelly, a foam, a mask, a pad, a powder, a solid, a tincture, a butter, a patch, a gel, a spray, a drip, a liquid formulation, an ointment to an external surface of a surface, such as a skin. Delivery can include a parenchymal injection, an intra-thecal injection, an intra-ventricular injection, or an intra-cisternal injection. A composition provided herein can be administered by any method. A method of administration can be by intra-arterial injection, intracisternal injection, intramuscular injection, intraparenchymal injection, intraperitoneal injection, intraspinal injection, intrathecal injection, intravenous injection, intraventricular injection, stereotactic injection, subcutaneous injection, epidural, or any combination thereof. Delivery can include parenteral administration (including intravenous, subcutaneous, intrathecal, intraperitoneal, intramuscular, intravascular or infusion administration). In some embodiments, delivery can comprise a nanoparticle, a liposome, an exosome, an extracellular vesicle, an implant, or a combination thereof. In some cases, delivery can be from a device. In some instances, delivery can be administered by a pump, an infusion pump, or a combination thereof. In some embodiments, delivery can be by an enema, an eye drop, a nasal spray, or any combination thereof. In some instances, a subject can administer the composition in the absence of supervision. In some instances, a subject can administer the composition under the supervision of a medical professional (e.g., a physician, nurse, physician's assistant, orderly, hospice worker, etc.). In some embodiments, a medical professional can administer the composition.

[0430] In some cases, administering can be oral ingestion. In some cases, delivery can be a capsule or a tablet. Oral ingestion delivery can comprise a tea, an elixir, a food, a drink, a beverage, a syrup, a liquid, a gel, a capsule, a tablet, an oil, a tincture, or any combination thereof. In some embodiments, a food can be a medical food. In some instances, a capsule can comprise hydroxymethylcellulose. In some embodiments, a capsule can comprise a gelatin, hydroxypropylmethyl cellulose, pullulan, or any combination thereof. In some cases, capsules can comprise a coating, for example, an enteric coating. In some embodiments, a capsule can comprise a vegetarian product or a vegan product such as a hypromellose capsule. In some embodiments, delivery can comprise inhalation by an inhaler, a diffuser, a nebulizer, a vaporizer, or a combination thereof.

[0431] In some embodiments, disclosed herein can be a method, comprising administering a composition disclosed herein to a subject (e.g., a human) in need thereof. In some instances, the method can treat (including prevent) a disease in the subject.

[0432] In some examples, a pharmaceutical composition disclosed herein can be administered at dosage levels sufficient to deliver from about 0.0001 mg/kg to about 100 mg/kg, from about 0.001 mg/kg to about 0.05 mg/kg, from about 0.005 mg/kg to about 0.05 mg/kg, from about 0.001 mg/kg to about 0.005 mg/kg, from about 0.05 mg/kg to about 0.5 mg/kg, from about 0.01 mg/kg to about 50 mg/kg, from about 0.1 mg/kg to about 40 mg/kg, from about 0.5 mg/kg to about 30 mg/kg, from about 0.01 mg/kg to about 10 mg/kg, from about 0.1 mg/kg to about 10 mg/kg, or from about 1 mg/kg to about 25 mg/kg, of subject body weight per day, one or more times a day, to obtain the desired therapeutic, diagnostic, or prophylactic, effect.

[0433] The appropriate dosage and treatment regimen for the methods of treatment described herein vary with respect to the particular disease being treated, the gRNA and/or ADAR (or a vector encoding the gRNA and/or ADAR) being delivered, and the specific condition of the subject. In some examples, the administration can be over a period of time until the desired effect (e.g., reduction in symptoms can be achieved). In some examples, administration can be 1, 2, 3, 4, 5, 6, or 7 times per week. In some examples, administration or application of a composition disclosed herein can be performed for a treatment duration of at least about 1 week, at least about 1 month, at least about 1 year, at least about 2 years, at least about 3 years, at least about 4 years, at least about 5 years, at least about 6 years, at least about 7 years, at least about 8 years, at least about 9 years, at least about 10 years, at least about 15 years, at least about 20 years, or more. In some examples, administration can be over a period of 1, 2, 3, 4, 5, 6, 7, 8, 9, or 10 weeks. In some examples, administration can be over a period of 2, 3, 4, 5, 6 or more months. In some examples, administration can be performed repeatedly over a lifetime of a subject, such as once a month or once a year for the lifetime of a subject. In some examples, administration can be performed repeatedly over a substantial portion of a subject's life, such as once a month or once a year for at least about 1 year, 5 years, 10 years, 15 years, 20 years, 25 years, 30 years, or more. In some examples, treatment can be resumed following a period of remission.

[0434] Pharmaceutical compositions for oral administration can be in tablet, capsule, powder, or liquid form. A tablet can include a solid carrier such as gelatin or an adjuvant. Liquid pharmaceutical compositions generally include a liquid carrier such as water, petroleum, animal or vegetable oils, mineral oil, or synthetic oil. Physiological saline solution, dextrose or other saccharide solution or glycols such as ethylene glycol, propylene glycol or polyethylene glycol can be included.

[0435] For intravenous, cutaneous, or subcutaneous injection, or injection at the site of affliction, the active ingredient will be in the form of a parenterally acceptable aqueous solution which is pyrogen-free and has suitable pH, isotonicity and stability. Those of relevant skill in the art are well able to prepare suitable solutions using, for example, isotonic vehicles such as Sodium Chloride Injection, Ringer's Injection, Lactated Ringer's Injection. Preservatives, stabilizers, buffers, antioxidants and/or other additives can be included, as required.

[0436] In some embodiments, the polynucleotide of the present disclosure or recombinant polynucleotide cassette of the present disclosure may be administered to cells via a lipid nanoparticle. In some embodiments, the lipid nanoparticle may be administered at the appropriate concentration according to standard methods appropriate for the target cells.

[0437] In some embodiments, the polynucleotide of the present disclosure or recombinant polynucleotide cassette of the present disclosure may be administered to cells via a viral vector. In some embodiments, the viral vector may be administered at the appropriate multiplicity of infection according to standard transduction methods appropriate for the target cells. Titers of the virus vector or capsid to administer can vary depending on the target cell type or cell state and number and can be determined by those of skill in the art. In some embodiments, at least about 10² infections units are administered. In some embodiments, at least about 10³, 10⁴, 10⁵, 10⁶, 10⁷, 10⁸, 10⁹, 10¹⁰, 10¹¹, 10¹², or 10¹³ infectious units are administered.

[0438] In some embodiments, the polynucleotide or recombinant polynucleotide cassette is introduced to cells of any type or state, including, but not limited to neural cells, cells of the eye (including retinal cells, retinal pigment epithelium, and corneal cells), lung cells, epithelial cells, skeletal muscle cells, dendritic cells, hepatic cells, pancreatic cells, bone cells, hematopoietic stem cells, spleen cells, keratinocytes, fibroblasts, endothelial cells, prostate cells, and heart cells.

[0439] In some embodiments, the polynucleotide or the disclosure or the recombinant polynucleotide cassette of the disclosure may be introduced to cells in vitro via a viral vector for administration of modified cells to a subject. In some embodiments, a viral vector encoding the polynucleotide of the disclosure or the recombinant polynucleotide cassette of the disclosure is introduced to cells that have been removed from a subject. In some embodiments, the modified cells are placed back in the subject following introduction of the viral vector.

[0440] In some embodiments, a dose of modified cells is administered to a subject according to the age and species of the subject, disease or disorder to be treated, as well as the cell type or state and mode of administration. In some embodiments, at least about 10²-10⁸ cells are administered per dose. In some embodiments, cells transduced with viral vector are administered to a subject in an effective amount.

[0441] In some embodiments, the dose of viral vector administered to a subject will vary according to the age of the subject, the disease or disorder to be treated, and mode of administration. In some embodiments, the dose for achieving a therapeutic effect is a virus titer of at least about 10², 103, 104, 10¹, 10⁶, 107, 10¹, 10¹, 10¹⁰, 10¹¹, 10¹², 10¹³, 1014, 10¹¹, 10¹⁶ or more transducing units.

[0442] Administration of the pharmaceutically useful polynucleotide of the present disclosure or the polynucleotide cassette of the present disclosure is preferably in a “therapeutically effective amount” or “prophylactically effective amount” (as the case can be, although prophylaxis can be considered therapy), this being sufficient to show benefit to the individual. The actual amount administered, and rate and time-course of administration, will depend on the nature and severity of protein aggregation disease being treated. Prescription of treatment, e.g., decisions on dosage etc., is within the responsibility of general practitioners and other medical doctors, and typically takes account of the disorder to be treated, the condition of the individual patient, the site of delivery, the method of administration and other factors known to practitioners. Examples of the techniques and protocols mentioned above can be found in Remington's Pharmaceutical Sciences, 16th edition, Osol, A. (ed), 1980.

[0443] A composition can be administered alone or in combination with other treatments, either simultaneously or sequentially dependent upon the condition to be treated.

[0444] Unless defined otherwise, all terms of art, notations and other technical and scientific terms or terminology used herein is intended to have the same meaning as is commonly understood by one of ordinary skill in the art to which the claimed subject matter pertains. In some cases, terms with commonly understood meanings are defined herein for clarity and/or for ready reference, and the inclusion of such definitions herein should not necessarily be construed to represent a substantial difference over what is generally understood in the art.

[0445] The term “complementary” or “complementarity” refers to the ability of a nucleic acid to form one or more bonds with a corresponding nucleic acid sequence by, for example, hydrogen bonding (e.g., traditional Watson-Crick), covalent bonding, or other similar methods. In Watson-Crick base pairing, a double hydrogen bond forms between nucleobases T and A, whereas a triple hydrogen bond forms between nucleobases C and G. For example, the sequence A-G-T can be complementary to the sequence T-C-A. A percent complementarity indicates the percentage of residues in a nucleic acid molecule which can form hydrogen bonds (e.g., Watson-Crick base pairing) with a second nucleic acid sequence (e.g., 5, 6, 7, 8, 9, 10 out of 10 being 50%, 60%, 70%, 80%, 90%, and 100% complementary, respectively). “Perfectly complementary” can mean that all the contiguous residues of a nucleic acid sequence will hydrogen bond with the same number of contiguous residues in a second nucleic acid sequence. “Substantially complementary” as used herein can refer to a degree of complementarity that can be at least 60%, 65%, 70%, 75%, 80%, 85%, 90%, 95%, 97%, 98%, 99%, or 100% over a region of 10, 15, 20, 25, 30, 35, 40, 45, 50, or more nucleotides, or can refer to two nucleic acids that hybridize under stringent conditions (i.e., stringent hybridization conditions). Nucleic acids can include nonspecific sequences. As used herein, the term “nonspecific sequence” or “not specific” can refer to a nucleic acid sequence that contains a series of residues that can be not designed to be complementary to or can be only partially complementary to any other nucleic acid sequence.

[0446] The terms “determining,” “measuring,” “evaluating,” “assessing,” “assaying,” and “analyzing” can be used interchangeably herein to refer to forms of measurement. The terms include determining if an element is present or not (for example, detection). These terms can include quantitative, qualitative, or quantitative and qualitative determinations. Assessing can be relative or absolute. “Detecting the presence of” can include determining the amount of something present in addition to determining whether it is present or absent depending on the context.

[0447] The term “encode,” as used herein, refers to an ability of a polynucleotide to provide information or instructions sequence sufficient to produce a corresponding gene expression product. In a non-limiting example, mRNA can encode a polypeptide during translation, whereas DNA can encode a mRNA molecule during transcription.

[0448] As used herein, the term “facilitates RNA editing” by an engineered guide RNA refers to the ability of the engineered guide RNA when associated with an RNA editing entity and a target RNA to provide a targeted edit of the target RNA by the RNA edited entity. In some instances, the engineered guide RNA can directly recruit or position/orient the RNA editing entity to the proper location for editing of the target RNA. In other instances, the engineered guide RNA when hybridized to the target RNA forms a guide-target RNA scaffold with one or more structural features as described herein, where the guide-target RNA scaffold with structural features recruits or positions/orients the RNA editing entity to the proper location for editing of the target RNA.

[0449] As used herein, the term “engineered guide RNA” can be used interchangeable with “guide RNA” and refers to a designed polynucleotide that is at least partially complementary to a target RNA. An engineered guide RNA of the present disclosure can be used to facilitate modification of the target RNA. Modification of the target RNA includes alteration of RNA splicing, reduction or enhancement of protein translation, target RNA knockdown, target RNA degradation, and/or ADAR mediated RNA editing of the target RNA. In some cases, guide RNAs facilitate ADAR mediated RNA editing for the purpose of target mRNA knockdown, downstream protein translation reduction or inhibition, downstream protein translation enhancement, correction of mutations (including correction of any G to A mutation, such as missense or nonsense mutations), introduction of mutations (e.g., introduction of an A to I (read as a G by cellular machinery) substitution), or alter the function of any adenosine containing a regulatory motif (e.g., polyadenylation signal, miRNA binding site, etc.). In some cases, a guide RNA can effect a functional outcome (e.g., target RNA modulation, downstream protein translation) via a combination of mechanisms, for example, ADAR-mediated RNA editing and binding and/or degrading target RNA. In some cases, a guide RNA can facilitate introduction of mutations at sites targeted by enzymes in order to modify the affinity of such enzymes for targeting and cleaving such sites. The guide RNAs of this disclosure can contain one or more structural features. A structural feature can be formed from latent structure in latent (unbound) guide RNA upon hybridization of the engineered latent guide RNA to a target RNA. Latent structure refers to a structural feature that forms or substantially forms only upon hybridization of a guide RNA to a target RNA. For example, upon hybridization of the guide RNA to the target RNA, the latent structural feature is formed in the resulting double stranded RNA (also referred herein as guide-target RNA scaffold). In such cases, a structural feature can include, but is not limited to, a mismatch, a wobble base pair, a symmetric internal loop, an asymmetric internal loop, a symmetric bulge, or an asymmetric bulge. In other instances, a structural feature can be a pre-formed structure (e.g., a GluR2 recruitment hairpin, or a hairpin from U7 snRNA).

[0450] A “guide-target RNA scaffold,” as disclosed herein, is the resulting double stranded RNA formed upon hybridization of a guide RNA, with latent structure, to a target RNA. A guide-target RNA scaffold has one or more structural features formed within the double stranded RNA duplex upon hybridization. For example, the guide-target RNA scaffold can have one or more structural features selected from a bulge, mismatch, internal loop, hairpin, or wobble base pair.

[0451] “Messenger RNA” or “mRNA” are RNA molecules comprising a sequence that encodes a polypeptide or protein. In general, RNA can be transcribed from DNA. In some cases, precursor mRNA containing non-protein coding regions in the sequence can be transcribed from DNA and then processed to remove all or a portion of the non-coding regions (introns) to produce mature mRNA. As used herein, the term “pre-mRNA” can refer to the RNA molecule transcribed from DNA before undergoing processing to remove the non-protein coding regions.

[0452] As disclosed herein, a “mismatch” refers to a single nucleotide in a guide RNA that is unpaired to an opposing single nucleotide in a target RNA within the guide-target RNA scaffold. A mismatch can comprise any two single nucleotides that do not base pair. Where the number of participating nucleotides on the guide RNA side and the target RNA side exceeds 1, the resulting structure is no longer considered a mismatch, but rather, is considered a “bulge” or an “internal loop,” depending on the size of the structural feature.

[0453] The term “structured motif” refers to a combination of two or more structural features in a guide-target RNA scaffold.

[0454] The terms “subject,” “individual,” or “patient” can be used interchangeably herein. A “subject” refers to a biological entity containing expressed genetic materials. The biological entity can be a plant, animal, or microorganism, including, for example, bacteria, viruses, fungi, and protozoa. The subject can be tissues, cells and their progeny of a biological entity obtained in vivo or cultured in vitro. The subject can be a mammal. The mammal can be a human. The subject can be diagnosed or suspected of being at high risk for a disease. In some cases, the subject may not be necessarily diagnosed or suspected of being at high risk for the disease

[0455] The term “in vivo” refers to an event that takes place in a subject's body.

[0456] The term “ex vivo” refers to an event that takes place outside of a subject's body. An ex vivo assay may not be performed on a subject. Rather, it can be performed upon a sample separate from a subject. An example of an ex vivo assay performed on a sample can be an “in vitro” assay.

[0457] The term “in vitro” refers to an event that takes places contained in a container for holding laboratory reagent such that it can be separated from the biological source from which the material can be obtained. In vitro assays can encompass cell-based assays in which living or dead cells can be employed. In vitro assays can also encompass a cell-free assay in which no intact cells can be employed.

[0458] The term “wobble base pair” refers to two bases that weakly pair. For example, a wobble base pair can refer to a G paired with a U.

[0459] The term “substantially forms” as described herein, when referring to a particular secondary structure, refers to formation of at least 80% of the structure under physiological conditions (e.g., physiological pH, physiological temperature, physiological salt concentration, etc.).

[0460] As used herein, the term “therapeutic polynucleotide” may to a polynucleotide that is introduced into a cell and is capable of being expressed in the cell or to a polynucleotide that may, in itself, have a therapeutic activity, such as a gRNA or a tRNA.

[0461] As used herein, the term “polynucleotide” refers to a single or double-stranded polymer of deoxyribonucleotide (DNA) or ribonucleotide (RNA) bases read from the 5′ to the 3′ end. The term “RNA” is inclusive of dsRNA (double stranded RNA), snRNA (small nuclear RNA), lncRNA (long non-coding RNA), mRNA (messenger RNA), miRNA (microRNA) RNAi (inhibitory RNA), siRNA (small interfering RNA), shRNA (short hairpin RNA), tRNA (transfer RNA), rRNA (ribosomal RNA), snoRNA (small nucleolar RNA), and cRNA (complementary RNA). The term DNA is inclusive of cDNA, genomic DNA, and DNA-RNA hybrids. A sequence of a polynucleotide may be provided interchangeably as an RNA sequence (containing U) or a DNA sequence (containing T). A sequence provided as an RNA sequence is intended to also cover the corresponding DNA sequence and the reverse complement RNA sequence or DNA sequence. A sequence provided as a DNA sequence is intended to also cover the corresponding RNA sequence and the reverse complement RNA sequence or DNA sequence.

[0462] The term “protein”, “peptide” and “polypeptide” can be used interchangeably and in their broadest sense can refer to a compound of two or more subunit amino acids, amino acid analogs or peptidomimetics. The subunits can be linked by peptide bonds. In another embodiment, the subunit can be linked by other bonds, e.g., ester, ether, etc. A protein or peptide can contain at least two amino acids and no limitation can be placed on the maximum number of amino acids which can comprise a protein's or peptide's sequence. As used herein the term “amino acid” can refer to either natural amino acids, unnatural amino acids, or synthetic amino acids, including glycine and both the D and L optical isomers, amino acid analogs and peptidomimetics. As used herein, the term “fusion protein” can refer to a protein comprised of domains from more than one naturally occurring or recombinantly produced protein, where generally each domain serves a different function. In this regard, the term “linker” can refer to a protein fragment that can be used to link these domains together—optionally to preserve the conformation of the fused protein domains, prevent unfavorable interactions between the fused protein domains which can compromise their respective functions, or both.

[0463] The term “ameliorating” refers to any therapeutically beneficial result in the treatment of a disease state, e.g., Rett syndrome, including prophylaxis, lessening in the severity or progression, remission, or cure thereof.

[0464] The term “mammal” as used herein includes both humans and non-humans and include but is not limited to humans, non-human primates, canines, felines, murines, bovines, equines, and porcines.

[0465] The term percent “identity,” in the context of two or more nucleic acid or polypeptide sequences, refers to two or more sequences or subsequences that have a specified percentage of nucleotides or amino acid residues that are the same, when compared and aligned for maximum correspondence, as measured using one of the sequence comparison algorithms described below (e.g., BLASTP and BLASTN or other algorithms available to persons of skill) or by visual inspection. Depending on the application, the percent “identity” can exist over a region of the sequence being compared, e.g., over a functional domain, or, alternatively, exist over the full length of the two sequences to be compared.

[0466] For sequence comparison, typically one sequence acts as a reference sequence (also called the subject sequence) to which test sequences (also called query sequences) are compared. The percent sequence identity is defined as a test sequence's percent identity to a reference sequence. For example, when stated “Sequence A having a sequence identity of 50% to Sequence B,” Sequence A is the test sequence and Sequence B is the reference sequence. When using a sequence comparison algorithm, test and reference sequences are input into a computer program, subsequence coordinates are designated, if necessary, and sequence algorithm program parameters are designated. The sequence comparison algorithm then aligns the sequences to achieve the maximum alignment, based on the designated program parameters, introducing gaps in the alignment if necessary. The percent sequence identity for the test sequence(s) relative to the reference sequence can then be determined from the alignment of the test sequence to the reference sequence. The equation for percent sequence identity from the aligned sequence is as follows:

[(Number of Identical Positions)/(Total Number of Positions in the Test Sequence)]×100%

[0467] For purposes herein, percent identity and sequence similarity calculations are performed using the BLAST algorithm for sequence alignment, which is described in Altschul et al., J. Mol. Biol. 215:403-410 (1990). Software for performing BLAST analyses is publicly available through the National Center for Biotechnology Information (www.ncbi.nlm.nih.gov/). The BLAST algorithm uses a test sequence (also called a query sequence) and a reference sequence (also called a subject sequence) to search against, or in some cases, a database of multiple reference sequences to search against. The BLAST algorithm performs sequence alignment by finding high-scoring alignment regions between the test and the reference sequences by scoring alignment of short regions of the test sequence (termed “words”) to the reference sequence. The scoring of each alignment is determined by the BLAST algorithm and takes factors into account, such as the number of aligned positions, as well as whether introduction of gaps between the test and the reference sequences would improve the alignment. The alignment scores for nucleic acids can be scored by set match/mismatch scores. For protein sequences, the alignment scores can be scored using a substitution matrix to evaluate the significance of the sequence alignment, for example, the similarity between aligned amino acids based on their evolutionary probability of substitution. For purposes herein, the substitution matrix used is the BLOSUM62 matrix. For purposes herein, the public default values of Apr. 6, 2023, are used when using the BLASTN and BLASTP algorithms. The BLASTN and BLASTP algorithms then output a “Percent Identity” output value and a “Query Coverage” output value. The overall percent sequence identity as used herein can then be calculated from the BLASTN or BLASTP output values as follows:

Percent Sequence Identity=(“Percent Identity” output value)×(“Query Coverage” output value)

[0468] The following non-limiting examples illustrate the calculation of percent identity between two nucleic acids sequences. The percent identity is calculated as follows: [(number of identical nucleotide positions)/(total number of nucleotides in the test sequence)]×100%. Percent identity is calculated to compare test sequence 1: AAAAAGGGGG (SEQ ID NO: 1276) (length=10 nucleotides) to reference sequence 2: AAAAAAAAAA (SEQ ID NO: 1277) (length=10 nucleotides). The percent identity between test sequence 1 and reference sequence 2 would be [(5)/(10)]×100%=50%. Test sequence 1 has 50% sequence identity to reference sequence 2. In another example, percent identity is calculated to compare test sequence 3: CCCCCGGGGGGGGGGCCCCC (SEQ ID NO: 1278) (length=20 nucleotides) to reference sequence 4: GGGGGGGGGG (SEQ ID NO: 1279) (length=10 nucleotides). The percent identity between test sequence 3 and reference sequence 4 would be [(10)/(20)]×100%=50%. Test sequence 3 has 50% sequence identity to reference sequence 4. In another example, percent identity is calculated to compare test sequence 5: GGGGGGGGGG (SEQ ID NO:1279) (length=10 nucleotides) to reference sequence 6: CCCCCGGGGGGGGGGCCCCC (SEQ ID NO: 1278) (length=20 nucleotides). The percent identity between test sequence 5 and reference sequence 6 would be [(10)/(10)]×100%=100%. Test sequence 5 has 100% sequence identity to reference sequence 6.

[0469] The following non-limiting examples illustrate the calculation of percent identity between two protein sequences. The percent identity is calculated as follows: [(number of identical amino acid positions)/(total number of amino acids in the test sequence)]×100%. Percent identity is calculated to compare test sequence 7: FFFFFYYYYY (SEQ ID NO:1280) (length=10 amino acids) to reference sequence 8: YYYYYYYYYY (SEQ ID NO: 1281) (length=10 amino acids). The percent identity between test sequence 7 and reference sequence 8 would be [(5)/(10)]×100%=50%. Test sequence 7 has 50% sequence identity to reference sequence 8. In another example, percent identity is calculated to compare test sequence 9: LLLLLFFFFFYYYYYLLLLL (SEQ ID NO: 1282) (length=20 amino acids) to reference sequence 10: FFFFFYYYYY (SEQ ID NO: 1280) (length=10 amino acids). The percent identity between test sequence 9 and reference sequence 10 would be [(10)/(20)]×100%=50%. Test sequence 9 has 50% sequence identity to reference sequence 10. In another example, percent identity is calculated to compare test sequence 11: FFFFFYYYYY (SEQ ID NO: 1280) (length=10 amino acids) to reference sequence 12: LLLLLFFFFFYYYYYLLLLL (SEQ ID NO:1282) (length=20 amino acids). The percent identity between test sequence 11 and reference sequence 12 would be [(10)/(10)]×100%=100%. Test sequence 11 has 100% sequence identity to reference sequence 12.

[0470] As used herein, the term “subject” broadly refers to any animal, including but not limited to, human and non-human animals (e.g., dogs, cats, cows, horses, sheep, pigs, poultry, fish, crustaceans, etc.).

[0471] As used herein, the term “effective amount” refers to the amount of a composition (e.g., a synthetic peptide) sufficient to effect beneficial or desired results. An effective amount can be administered in one or more administrations, applications or dosages and is not intended to be limited to a particular formulation or administration route.

[0472] As used herein, the term “therapeutically effective amount” is an amount that is effective to ameliorate a symptom of a disease. A therapeutically effective amount can be a “prophylactically effective amount” as prophylaxis can be considered therapy.

[0473] As used herein, the terms “administration” and “administering” refer to the act of giving a drug, prodrug, or other agent, or therapeutic treatment (e.g., peptide) to a subject or in vivo, in vitro, or ex vivo cells, tissues, and organs. Exemplary routes of administration to the human body can be through space under the arachnoid membrane of the brain or spinal cord (intrathecal), the eyes (ophthalmic), mouth (oral), skin (topical or transdermal), nose (nasal), lungs (inhalant), oral mucosa (buccal or lingual), ear, rectal, vaginal, by injection (e.g., intravenously, subcutaneously, intratumorally, intraperitoneally, etc.) and the like.

[0474] As used herein, the term “treatment” or “treating” means an approach to obtaining a beneficial or intended clinical result. The beneficial or intended clinical result can include a therapeutic benefit and/or a prophylactic benefit, alleviation of symptoms, a reduction in the severity of the disease, inhibiting an underlying cause of a disease or condition, steadying diseases in a non-advanced state, delaying the progress of a disease, and/or improvement or alleviation of disease conditions. Also, a therapeutic benefit can be achieved with the eradication or amelioration of one or more of the physiological symptoms associated with the underlying disorder such that an improvement can be observed in the subject, notwithstanding that the subject can still be afflicted with the underlying disorder. A prophylactic effect includes delaying, preventing, or eliminating the appearance of a disease or condition, delaying or eliminating the onset of one or more symptoms of a disease or condition, slowing, halting, or reversing the progression of a disease or condition, or any combination thereof. For prophylactic benefit, a subject at risk of developing a particular disease, or to a subject reporting one or more of the physiological symptoms of a disease can undergo treatment, even though a diagnosis of this disease may not have been made.

[0475] As used herein, the term “pharmaceutical composition” refers to the combination of an active ingredient with a carrier, inert or active, making the composition especially suitable for therapeutic or diagnostic use in vitro, in vivo or ex vivo.

[0476] The terms “pharmaceutically acceptable” or “pharmacologically acceptable,” as used herein, refer to compositions that do not substantially produce adverse reactions, e.g., toxic, allergic, or immunological reactions, when administered to a subject.

[0477] As used herein, the term “pharmaceutically acceptable carrier” refers to any of the standard pharmaceutical carriers including, but not limited to, phosphate buffered saline solution, water, emulsions (e.g., such as an oil/water or water/oil emulsions), glycerol, liquid polyethylene glycols, aprotic solvents such as dimethylsulfoxide, N-methylpyrrolidone and mixtures thereof, and various types of wetting agents, solubilizing agents, anti-oxidants, bulking agents, protein carriers such as albumins, any and all solvents, dispersion media, coatings, sodium lauryl sulfate, isotonic and absorption delaying agents, disintegrants (e.g., potato starch or sodium starch glycolate), and the like. The compositions also can include stabilizers and preservatives. For examples of carriers, stabilizers and adjuvants, see, e.g., Martin, Remington's Pharmaceutical Sciences, 2^{st} Ed., Mack Publ. Co., Easton, Pa. (2005), incorporated herein by reference in its entirety.

[0478] Throughout this application, various embodiments are presented in a range format. It should be understood that the description in range format is merely for convenience and brevity and should not be construed as an inflexible limitation on the scope of the disclosure. Accordingly, the description of a range should be considered to have specifically disclosed all the possible subranges as well as individual numerical values within that range. For example, description of a range such as from 1 to 6 should be considered to have specifically disclosed subranges such as from 1 to 3, from 1 to 4, from 1 to 5, from 2 to 4, from 2 to 6, from 3 to 6 etc., as well as individual numbers within that range, for example, 1, 2, 3, 4, 5, and 6. This applies regardless of the breadth of the range.

[0479] As used herein, the singular forms “a,” “an” and “the” include plural referents unless the context clearly dictates otherwise.

[0480] As used herein, the terms “about” and “approximately,” in reference to a number, is used herein to include numbers that fall within a range of 10%, 5%, or 1% in either direction (greater than or less than) the number unless otherwise stated or otherwise evident from the context (except where such number would exceed 100% of a possible value).

### NUMBERED EMBODIMENTS

[0481] The following embodiments recite non-limiting permutations of combinations of features disclosed herein. Other permutations of combinations of features are also contemplated. In particular, each of these numbered embodiments is contemplated as depending from or relating to every previous or subsequent numbered embodiment, independent of their order as listed. 1. An expression cassette comprising: a promoter sequence comprising: a zinc finger 143 motif, an OCT-1 transcription factor binding sequence, a proximal sequence element; a payload sequence under transcriptional control of the promoter sequence, the payload sequence comprising a small RNA payload; and a transcription termination sequence; wherein the expression cassette comprises one or more sequence elements selected from the group consisting of: a) the zinc finger 143 motif having at least 80% sequence identity to any one of SEQ ID NO: 24-SEQ ID NO: 26, b) the OCT-1 transcription factor binding sequence having at least 80% sequence identity to any one of SEQ ID NO: 27-SEQ ID NO: 30, c) the proximal sequence element having at least 80% sequence identity to any one of SEQ ID NO: 31-SEQ ID NO: 37, and d) combinations thereof. 2. The expression cassette of embodiment 1, wherein the zinc finger 143 motif comprises at least 80%, at least 85%, at least 90%, at least 95%, or 100% sequence identity to any one of SEQ ID NO: 24-SEQ ID NO: 26. 3. The expression cassette of embodiment 1, wherein the zinc finger 143 motif comprises at least 80%, at least 85%, at least 90%, at least 95%, or 100% sequence identity to SEQ ID NO: 20. 4. The expression cassette of any one of embodiments 1-3, wherein the OCT-1 transcription factor binding sequence comprises at least 80%, at least 85%, at least 90%, at least 95%, or 100% sequence identity to any one of SEQ ID NO: 27-SEQ ID NO: 30. 5. The expression cassette of any one of embodiments 1-4, wherein the proximal sequence element comprises at least 80%, at least 85%, at least 90%, at least 95%, or 100% sequence identity to any one of SEQ ID NO: 31-SEQ ID NO: 37. 6. The expression cassette of any one of embodiments 1-5, wherein the transcription termination sequence comprises at least 80%, at least 85%, at least 90%, at least 95%, or 100% sequence identity to any one of SEQ ID NO: 40-SEQ ID NO: 42. 7. The expression cassette of any one of embodiments 1-6, wherein the transcription termination sequence comprises at least 80%, at least 85%, at least 90%, at least 95%, or 100% sequence identity to SEQ ID NO: 60 SEQ ID NO: 1242-SEQ ID NO: 1247, or SEQ ID NO: 1254-SEQ ID NO: 1257. 8. The expression cassette of any one of embodiments 1-7, wherein the transcription termination sequence comprises at least 80%, at least 85%, at least 90%, at least 95%, or 100% sequence identity to SEQ ID NO: 1242. 9. The expression cassette of any one of embodiments 1-7, wherein the transcription termination sequence comprises a sequence of SEQ ID NO: 1242. 10. The expression cassette of any one of embodiments 1-7, wherein the transcription termination sequence comprises at least 80%, at least 85%, at least 90%, at least 95%, or 100% sequence identity to SEQ ID NO: 60. 11. The expression cassette of any one of embodiments 1-7, wherein the transcription termination sequence comprises a sequence of SEQ ID NO: 60. 12. The expression cassette of any one of embodiments 1-11, wherein the transcription termination sequence comprises a sequence of SEQ ID NO: 38 or SEQ ID NO: 39. 13. An expression cassette comprising: a promoter sequence comprising a proximal sequence element, wherein the promoter sequence comprises a sequence having at least 75% sequence identity to any one of SEQ ID NO: 13-SEQ ID NO: 17, SEQ ID NO: 167-SEQ ID NO: 707, SEQ ID NO: 1241, SEQ ID NO: 1248-SEQ ID NO: 1253 in which the proximal sequence element of the promoter sequence is replaced with a sequence of any one of SEQ ID NO: 67-SEQ ID NO: 120; a payload sequence under transcriptional control of the promoter sequence, the payload sequence comprising a small RNA payload; and a transcription termination sequence comprising a 3′ box sequence element, wherein the transcription termination sequence comprises a sequence having at least 75% sequence identity to any one of SEQ ID NO: 60, SEQ ID NO: 708-SEQ ID NO: 1240, SEQ ID NO: 1242-SEQ ID NO: 1247, SEQ ID NO: 1254-SEQ ID NO: 1257 in which the 3′ box sequence element of the termination sequence is replaced with a sequence of any one of SEQ ID NO: 121-SEQ ID NO: 166. 14. The expression cassette of embodiment 13, wherein the promoter sequence comprises a sequence having at least 80% sequence identity to any one of SEQ ID NO: 13-SEQ ID NO: 17, SEQ ID NO: 167-SEQ ID NO: 707, SEQ ID NO: 1241, SEQ ID NO: 1248-SEQ ID NO: 1253 in which the proximal sequence element of the promoter sequence is replaced with a sequence of any one of SEQ ID NO: 67-SEQ ID NO: 120. 15. The expression cassette of embodiment 13 or embodiment 14, wherein the promoter sequence comprises a sequence having at least 90% sequence identity to any one of SEQ ID NO: 13-SEQ ID NO: 17, SEQ ID NO: 167-SEQ ID NO: 707, SEQ ID NO: 1241, SEQ ID NO: 1248-SEQ ID NO: 1253 in which the proximal sequence element of the promoter sequence is replaced with a sequence of any one of SEQ ID NO: 67-SEQ ID NO: 120. 16. The expression cassette of any one of embodiments 13-15, wherein the termination sequence comprises a sequence having at least 80% sequence identity to any one of SEQ ID NO: 60, SEQ ID NO: 708-SEQ ID NO: 1240, SEQ ID NO: 1242-SEQ ID NO: 1247, SEQ ID NO: 1254-SEQ ID NO: 1257 in which the 3′ box sequence element of the termination sequence is replaced with a sequence of any one of SEQ ID NO: 121-SEQ ID NO: 166. 17. The expression cassette of any one of embodiments 13-16, wherein the termination sequence comprises a sequence having at least 90% sequence identity to any one of SEQ ID NO: 60, SEQ ID NO: 708-SEQ ID NO: 1240, SEQ ID NO: 1242-SEQ ID NO: 1247, SEQ ID NO: 1254-SEQ ID NO: 1257 in which the 3′ box sequence element of the termination sequence is replaced with a sequence of any one of SEQ ID NO: 121-SEQ ID NO: 166. 18. An expression cassette comprising: a promoter sequence comprising a sequence having at least 75% sequence identity to any one of SEQ ID NO: 16-SEQ ID NO: 17, SEQ ID NO: 167-SEQ ID NO: 707, SEQ ID NO: 1241, SEQ ID NO: 1248-SEQ ID NO: 1253; a payload sequence under transcriptional control of the promoter sequence, the payload sequence comprising a small RNA payload; and a transcription termination sequence comprising a sequence having at least 75% sequence identity to any one of SEQ ID NO: 60, SEQ ID NO: 708-SEQ ID NO: 1240, SEQ ID NO: 1242-SEQ ID NO: 1247, SEQ ID NO: 1254-SEQ ID NO: 1257. 19. The expression cassette of embodiment 18, wherein the promoter sequence comprises a sequence having at least 80% sequence identity to any one of SEQ ID NO: 16-SEQ ID NO: 17, SEQ ID NO: 167-SEQ ID NO: 707, SEQ ID NO: 1241, SEQ ID NO: 1248-SEQ ID NO: 1253. 20. The expression cassette of embodiment 18 or embodiment 19, wherein the promoter sequence comprises a sequence having at least 90% sequence identity to any one of SEQ ID NO: 16-SEQ ID NO: 17, SEQ ID NO: 167-SEQ ID NO: 707, SEQ ID NO: 1241, SEQ ID NO: 1248-SEQ ID NO: 1253. 21. The expression cassette of any one of embodiments 18-20, wherein the termination sequence comprises a sequence having at least 80% sequence identity to any one of SEQ ID NO: 60, SEQ ID NO: 708-SEQ ID NO: 1240, SEQ ID NO: 1242-SEQ ID NO: 1247, SEQ ID NO: 1254-SEQ ID NO: 1257. 22. The expression cassette of any one of embodiments 18-21, wherein the termination sequence comprises a sequence having at least 90% sequence identity to any one of SEQ ID NO: 60, SEQ ID NO: 708-SEQ ID NO: 1240, SEQ ID NO: 1242-SEQ ID NO: 1247, SEQ ID NO: 1254-SEQ ID NO: 1257. 23. The expression cassette of any one of embodiments 13-22, wherein the promoter sequence is SEQ ID NO: 376. 24. The expression cassette of any one of embodiments 13-22, wherein the promoter sequence is SEQ ID NO: 1250. 25. The expression cassette of embodiment 23 or embodiment 24, wherein the transcription termination sequence is SEQ ID NO: 917. 26. The expression cassette of embodiment 23 or embodiment 24, wherein the transcription termination sequence is SEQ ID NO: 1254. 27. The expression cassette of any one of embodiments 13-22, wherein the promoter sequence is SEQ ID NO: 168. 28. The expression cassette of any one of embodiments 13-22, wherein the promoter sequence is SEQ ID NO: 1251. 29. The expression cassette of embodiment 27 or embodiment 28, wherein the transcription termination sequence is SEQ ID NO: 709. 30. The expression cassette of embodiment 27 or embodiment 28, wherein the transcription termination sequence is SEQ ID NO: 1255. 31. The expression cassette of any one of embodiments 13-22, wherein the promoter sequence is SEQ ID NO: 1241. 32. The expression cassette of embodiment 31, wherein the transcription termination sequence is SEQ ID NO: 1242 or SEQ ID NO: 60. 33. The expression cassette of any one of embodiments 13-22, wherein the promoter sequence is SEQ ID NO: 17. 34. The expression cassette of embodiment 33, wherein the transcription termination sequence is SEQ ID NO: 1242 or SEQ ID NO: 60. 35. The expression cassette of any one of embodiments 1-34, wherein the small RNA payload comprises an engineered guide RNA capable of hybridizing to a target sequence. 36. The expression cassette of any one of embodiments 1-35, wherein the engineered guide RNA is at least 70%, at least 75%, at least 80%, at least 85%, at least 90%, at least 95%, or 100% reverse complementary to the target sequence. 37. The expression cassette of embodiment 35 or embodiment 36, wherein the engineered guide RNA comprises at least one base pair mismatch relative to the target sequence. 38. The expression cassette of any one of embodiments 35-37, wherein the target sequence comprises an adenosine residue. 39. The expression cassette of any one of embodiments 35-38, wherein the target sequence is an RNA sequence. 40. The expression cassette of embodiment 39, wherein the RNA sequence is a mRNA or a pre-mRNA. 41. The expression cassette of any one of embodiments 35-40, wherein the target sequence comprises a G to A mutation relative to a wild type sequence. 42. The expression cassette of any one of embodiments 35-41, wherein the target sequence comprises a missense mutation or a nonsense mutation relative to a wild type sequence. 43. The expression cassette of any one of embodiments 35-42, wherein the target sequence encodes α-synuclein (SNCA), peripheral myelin protein 22 (PMP22), double homeobox 4 (DUX4), leucine rich repeat kinase 2 (LRRK2), Tau (MAPT), progranulin (GRN), a duplication of the PMP22 associated with Charcot-Marie-Tooth disease type 1A (CMT1A), ATP-binding cassette sub-family A member 4 (ABCA4), amyloid precursor protein (APP), alpha-1 antitrypsin (SERPINA1), hexosaminidase A (HEXA), cystic fibrosis transmembrane conductance regulator (CFTR), lipase A (LIPA), glucosylceramidase beta (GBA), PTEN-induced kinase 1 (PINK1), or methyl CpG binding protein 2 (MECP2). 44. The expression cassette of any one of embodiments 35-43, wherein the payload sequence comprises at least 80%, at least 85%, at least 90%, at least 95%, or 100% sequence identity to SEQ ID NO: 1273, SEQ ID NO: 1274, or SEQ ID NO: 61. 45. The expression cassette of any one of embodiments 1-44, wherein the small RNA payload comprises an antisense oligonucleotide, an siRNA, an shRNA, a miRNA, or a tracrRNA. 46. The expression cassette of any one of embodiments 1-45, wherein the small RNA payload is not less than 20 nucleotide residues and not more than 500 nucleotide residues long. 47. The expression cassette of any one of embodiments 1-46, wherein the small RNA payload is not less than 60 and not more than 100 residues long. 48. The expression cassette of any one of embodiments 1-47, wherein the small RNA payload is not less than 80 and not more than 120 residues long. 49. The expression cassette of any one of embodiments 1-48, wherein the small RNA payload is not less than 100 and not more than 140 residues long. 50. The expression cassette of any one of embodiments 1-49, wherein the small RNA payload is not less than 130 and not more than 170 residues long. 51. The expression cassette of any one of embodiments 1-50, wherein the payload sequence further comprises an Sm binding sequence or a hairpin sequence. 52. The expression cassette of embodiment 51, wherein the hairpin sequence comprises a U7 hairpin. 53. The expression cassette of embodiment 51 or embodiment 52, wherein the hairpin sequence comprises at least 80%, at least 85%, at least 90%, at least 95%, or 100% sequence identity to SEQ ID NO: 52, SEQ ID NO: 54, SEQ ID NO: 56, or SEQ ID NO: 58. 54. The expression cassette of any one of embodiments 1-53, wherein the expression cassette comprises two or more of the sequence elements. 55. The expression cassette of any one of embodiments 1-54, wherein the expression cassette comprises three or more of the sequence elements. 56. The expression cassette of any one of embodiments 1-55, wherein the expression cassette has a length of not less than 1300 nucleotide residues and not more than 2160 nucleotide residues. 57. The expression cassette of any one of embodiments 1-56, wherein the expression cassette comprises at least 80% sequence identity to a U1 sequence or a U7 sequence. 58. The expression cassette of embodiment 57, wherein the U1 sequence is a mouse U1 sequence or a human U1 sequence. 59. The expression cassette of embodiment 57, wherein the U7 sequence is a mouse U7 sequence or a human U7 sequence. 60. The expression cassette of any one of embodiments 1-59, wherein the promoter sequence comprises at least 80%, at least 85%, at least 90%, at least 95%, or 100% sequence identity to any one of SEQ ID NO: 13-SEQ ID NO: 17, SEQ ID NO: 1241, or SEQ ID NO: 1248-SEQ ID NO: 1253. 61. The expression cassette of any one of embodiments 1-60, wherein the promoter sequence comprises at least 80%, at least 85%, at least 90%, at least 95%, or 100% sequence identity to SEQ ID NO: 1241. 62. The expression cassette of any one of embodiments 1-60, wherein the promoter sequence comprises a sequence of SEQ ID NO: 1241. 63. The expression cassette of embodiment 62, wherein the transcription termination sequence is SEQ ID NO: 1242 or SEQ ID NO: 60. 64. The expression cassette of any one of embodiments 1-60, wherein the promoter sequence comprises at least 80%, at least 85%, at least 90%, at least 95%, or 100% sequence identity to SEQ ID NO: 17. 65. The expression cassette of any one of embodiments 1-60, wherein the promoter sequence comprises a sequence of SEQ ID NO: 17. 66. The expression cassette of embodiment 64 or embodiment 65, wherein the transcription termination sequence is SEQ ID NO: 1242 or SEQ ID NO: 60. 67. The expression cassette of any one of embodiments 1-66, wherein the expression cassette comprises at least 80%, at least 85%, at least 90%, at least 95%, or 100% sequence identity to any one of SEQ ID NO: 1-SEQ ID NO: 12 or SEQ ID NO: 59. 68. The expression cassette of any one of embodiments 1-67, wherein the zinc finger 143 motif is capable of recruiting a ZNF143 transcription factor. 69. The expression cassette of any one of embodiments 1-68, wherein the OCT-1 transcription factor binding sequence is capable of recruiting an OCT-1 transcription factor. 70. The expression cassette of any one of embodiments 1-69, wherein the proximal sequence element is capable of recruiting a SNAPc. 71. The expression cassette of any one of embodiments 1-70, wherein the proximal sequence element is capable of integrator dependent recruitment of RNA polymerase II. 72. The expression cassette of any one of embodiments 1-71, wherein the small RNA payload is capable of forming a guide-target RNA scaffold comprising a structural feature upon hybridization of the small RNA payload to a target sequence. 73. The expression cassette of embodiment 72, wherein the structural feature is a bulge, a mismatch, an internal loop, a hairpin, or combinations thereof. 74. The expression cassette of embodiment 73, wherein the structural feature comprises the bulge, and wherein the bulge is a symmetric bulge. 75. The expression cassette of embodiment 73, wherein the structural feature comprises the bulge, and wherein the bulge is an asymmetric bulge. 76. The expression cassette of embodiment 73, wherein the structural feature comprises the internal loop, and wherein the internal loop is a symmetric internal loop. 77. The expression cassette of embodiment 73, wherein the structural feature comprises the internal loop, and wherein the internal loop is an asymmetric internal loop. 78. The expression cassette of embodiment 73, wherein the structural feature comprises the hairpin, and wherein the hairpin is a recruitment hairpin or a non-recruitment hairpin. 79. The expression cassette of any one of embodiments 72-78, wherein the guide-target RNA scaffold comprises a Wobble base pair. 80. A method of expressing a small RNA payload in a cell, the method comprising delivering the expression cassette of any one of embodiments 1-79 to a cell and expressing the small RNA payload encoded by the expression cassette in the cell. 81. A method of editing a target sequence, the method comprising: delivering an expression cassette to a cell encoding the target sequence, wherein the expression cassette comprises: a promoter sequence comprising: a zinc finger 143 motif, an OCT-1 transcription factor binding sequence, and a proximal sequence element, a payload sequence under transcriptional control of the promoter sequence, the payload sequence comprising a small RNA payload, wherein the small RNA payload comprises an engineered guide RNA sequence capable of hybridizing to the target sequence, and a transcription termination sequence; expressing the small RNA payload in the cell; forming a guide-target RNA scaffold upon hybridization of the small RNA payload to the target sequence; recruiting an editing enzyme to the target sequence; and editing the target sequence with the editing enzyme. 82. A method of editing a target sequence, the method comprising: delivering an expression cassette to a cell encoding the target sequence, wherein the expression cassette comprises: a promoter sequence comprising a proximal sequence element, wherein the promoter sequence comprises a sequence having at least 75% sequence identity to any one of SEQ ID NO: 13-SEQ ID NO: 17, SEQ ID NO: 167-SEQ ID NO: 707, SEQ ID NO: 1241, SEQ ID NO: 1248-SEQ ID NO: 1253 in which the proximal sequence element of the promoter sequence is replaced with a sequence of any one of SEQ ID NO: 67-SEQ ID NO: 120; a payload sequence under transcriptional control of the promoter sequence, the payload sequence comprising a small RNA payload; and a transcription termination sequence comprising a 3′ box sequence element, wherein the transcription termination sequence comprises a sequence having at least 75% sequence identity to any one of SEQ ID NO: 60, SEQ ID NO: 708-SEQ ID NO: 1240, SEQ ID NO: 1242-SEQ ID NO: 1247, SEQ ID NO: 1254-SEQ ID NO: 1257 in which the 3′ box sequence element of the termination sequence is replaced with a sequence of any one of SEQ ID NO: 121-SEQ ID NO: 166; expressing the small RNA payload in the cell; forming a guide-target RNA scaffold upon hybridization of the small RNA payload to the target sequence; recruiting an editing enzyme to the target sequence; and editing the target sequence with the editing enzyme. 83. A method of editing a target sequence, the method comprising: delivering an expression cassette to a cell encoding the target sequence, wherein the expression cassette comprises: a promoter sequence comprising a proximal sequence element, wherein the promoter sequence comprises a sequence having at least 75% sequence identity to any one of SEQ ID NO: 16-SEQ ID NO: 17, SEQ ID NO: 167-SEQ ID NO: 707, SEQ ID NO: 1241, SEQ ID NO: 1248-SEQ ID NO: 1253; a payload sequence under transcriptional control of the promoter sequence, the payload sequence comprising a small RNA payload; and a transcription termination sequence comprising a 3′ box sequence element, wherein the transcription termination sequence comprises a sequence having at least 75% sequence identity to any one of SEQ ID NO: 60, SEQ ID NO: 708-SEQ ID NO: 1240, SEQ ID NO: 1242-SEQ ID NO: 1247, SEQ ID NO: 1254-SEQ ID NO: 1257; expressing the small RNA payload in the cell; forming a guide-target RNA scaffold upon hybridization of the small RNA payload to the target sequence; recruiting an editing enzyme to the target sequence; and editing the target sequence with the editing enzyme. 84. The method of embodiment 82 or embodiment 83, wherein the promoter sequence is SEQ ID NO: 376. 85. The method of embodiment 82 or embodiment 83, wherein the promoter sequence is SEQ ID NO: 1250. 86. The method of embodiment 84 or embodiment 85, wherein the transcription termination sequence is SEQ ID NO: 917. 87. The method of embodiment 84 or embodiment 85, wherein the transcription termination sequence is SEQ ID NO: 1254. 88. The method of embodiment 82 or embodiment 83, wherein the promoter sequence is SEQ ID NO: 168. 89. The method of embodiment 82 or embodiment 83, wherein the promoter sequence is SEQ ID NO: 1251. 90. The method of embodiment 88 or embodiment 89, wherein the transcription termination sequence is SEQ ID NO: 709. 91. The method of embodiment 88 or embodiment 89, wherein the transcription termination sequence is SEQ ID NO: 1255. 92. The method of embodiment 82 or embodiment 83, wherein the promoter sequence is SEQ ID NO: 1241. 93. The method of embodiment 92, wherein the transcription termination sequence is SEQ ID NO: 1242 or SEQ ID NO: 60. 94. The method of embodiment 82 or embodiment 83, wherein the promoter sequence is SEQ ID NO: 17. 95. The method of embodiment 94, wherein the transcription termination sequence is SEQ ID NO: 1242 or SEQ ID NO: 60. 96. A method of editing a target sequence, the method comprising: delivering the expression cassette of any one of embodiments 1-79 to a cell encoding the target sequence; expressing the small RNA payload in the cell, wherein the small RNA payload comprises an engineered guide RNA capable of hybridizing to a target sequence; forming a guide-target RNA scaffold upon hybridization of the small RNA payload to the target sequence; recruiting an editing enzyme to the target sequence; and editing the target sequence with the editing enzyme. 97. The method of any one of embodiments 81-96, wherein the target sequence comprises a mutation relative to a wild type sequence. 98. The method of embodiment 97, wherein editing the target sequence corrects the mutation in the target sequence. 99. The method of embodiment 97 or embodiment 98, wherein the mutation is a missense mutation. 100. The method of embodiment 97 or embodiment 98, wherein the mutation is a nonsense mutation. 101. The method of any one of embodiments 97-100, wherein the mutation is a G to A mutation. 102. The method of any one of embodiments 97-101, wherein the mutation is associated with a disease. 103. The method of embodiment 102, wherein the disease is a synucleinopathy, Parkinson's disease, Lewy body dementia, multiple system atrophy, Charcot-Marie-Tooth disease, hereditary neuropathy with liability to pressure palsies, Yuan-Harel-Lupski syndrome, a tauopathy, Alzheimer's disease, frontotemporal dementia, progressive supranuclear palsy, corticobasal degeneration, chronic traumatic encephalopathy, autism, traumatic brain injury, Dravet syndrome, Crohn's disease, muscular dystrophy, B-cell leukemia, Dejerine-Sottas disease, Stargardt disease, alpha-1 antitrypsin deficiency, Tay-Sachs disease, cystic fibrosis, liposomal acid lipase deficiency, or Gaucher disease. 104. The method of any one of embodiments 81-103, wherein the target sequence encodes α-synuclein (SNCA), peripheral myelin protein 22 (PMP22), double homeobox 4 (DUX4), leucine rich repeat kinase 2 (LRRK2), Tau (MAPT), progranulin (GRN), a duplication of PMP22 associated with Charcot-Marie-Tooth disease type 1A (CMT1A), ATP-binding cassette sub-family A member 4 (ABCA4), amyloid precursor protein (APP), alpha-1 antitrypsin (SERPINA1), hexosaminidase A (HEXA), cystic fibrosis transmembrane conductance regulator (CFTR), lipase A (LIPA), glucosylceramidase beta (GBA), PTEN-induced kinase 1 (PINK1), or methyl CpG binding protein 2 (MECP2). 105. The method of embodiment 81-104, wherein editing the target sequence comprises editing an untranslated region of the target. 106. The method of embodiment 105, wherein the untranslated region is a 5′ untranslated region or a 3′ untranslated region. 107. The method of embodiment 106, wherein the 3′ untranslated region is a polyadenylation sequence. 108. The method of any one of embodiments 81-107, wherein editing the target sequence comprises editing a translation initiation site. 109. The method of any one of embodiments 81-107, wherein editing the target sequence alters expression of the target sequence. 110. The method of embodiment 109, wherein editing the target sequence increases expression of the target sequence. 111. The method of embodiment 109, wherein editing the target sequence decreases expression of the target sequence. 112. A method of treating a disease in a subject, the method comprising: administering to the subject a composition comprising an expression cassette comprising: a promoter sequence comprising: a zinc finger 143 motif, an OCT-1 transcription factor binding sequence, and a proximal sequence element, and a payload sequence under transcriptional control of the promoter sequence, the payload sequence comprising a small RNA payload; delivering the expression cassette to a cell of the subject; and expressing the small RNA payload in the cell, thereby treating the disease. 113. A method of treating a disease in a subject, the method comprising: administering to the subject a composition comprising an expression cassette comprising: a promoter sequence comprising a proximal sequence element, wherein the promoter sequence comprises a sequence having at least 75% sequence identity to any one of SEQ ID NO: 13-SEQ ID NO: 17, SEQ ID NO: 167-SEQ ID NO: 707, SEQ ID NO: 1241, SEQ ID NO: 1248-SEQ ID NO: 1253 in which the proximal sequence element of the promoter sequence is replaced with a sequence of any one of SEQ ID NO: 67-SEQ ID NO: 120; a payload sequence under transcriptional control of the promoter sequence, the payload sequence comprising a small RNA payload; and a transcription termination sequence comprising a 3′ box sequence element, wherein the transcription termination sequence comprises a sequence having at least 75% sequence identity to any one of SEQ ID NO: 60, SEQ ID NO: 708-SEQ ID NO: 1240, SEQ ID NO: 1242-SEQ ID NO: 1247, SEQ ID NO: 1254-SEQ ID NO: 1257 in which the 3′ box sequence element of the termination sequence is replaced with a sequence of any one of SEQ ID NO: 121-SEQ ID NO: 166; delivering the expression cassette to a cell of the subject; and expressing the small RNA payload in the cell, thereby treating the disease. 114. A method of treating a disease in a subject, the method comprising: administering to the subject a composition comprising an expression cassette comprising: a promoter sequence comprising a proximal sequence element, wherein the promoter sequence comprises a sequence having at least 75% sequence identity to any one of SEQ ID NO: 16-SEQ ID NO: 17, SEQ ID NO: 167-SEQ ID NO: 707, SEQ ID NO: 1241, SEQ ID NO: 1248-SEQ ID NO: 1253; a payload sequence under transcriptional control of the promoter sequence, the payload sequence comprising a small RNA payload; and a transcription termination sequence comprising a 3′ box sequence element, wherein the transcription termination sequence comprises a sequence having at least 75% sequence identity to any one of SEQ ID NO: 60, SEQ ID NO: 708-SEQ ID NO: 1240, SEQ ID NO: 1242-SEQ ID NO: 1247, SEQ ID NO: 1254-SEQ ID NO: 1257; delivering the expression cassette to a cell of the subject; and expressing the small RNA payload in the cell, thereby treating the disease. 115. The method of embodiment 113 or embodiment 114, wherein the promoter sequence is SEQ ID NO: 376. 116. The method of embodiment 113 or embodiment 114, wherein the promoter sequence is SEQ ID NO: 1250. 117. The method of embodiment 115 or embodiment 116, wherein the transcription termination sequence is SEQ ID NO: 917. 118. The method of embodiment 115 or embodiment 116, wherein the transcription termination sequence is SEQ ID NO: 1254. 119. The method of embodiment 113 or embodiment 114, wherein the promoter sequence is SEQ ID NO: 168. 120. The method of embodiment 113 or embodiment 114, wherein the promoter sequence is SEQ ID NO: 1251. 121. The method of embodiment 113 or embodiment 114, wherein the transcription termination sequence is SEQ ID NO: 709. 122. The method of embodiment 120 or embodiment 121, wherein the transcription termination sequence is SEQ ID NO: 1255. 123. The method of embodiment 113 or embodiment 114, wherein the promoter sequence is SEQ ID NO: 1241. 124. The method of embodiment 123, wherein the transcription termination sequence is SEQ ID NO: 1242 or SEQ ID NO: 60. 125. The method of embodiment 113 or embodiment 114, wherein the promoter sequence is SEQ ID NO: 17. 126. The method of embodiment 125, wherein the transcription termination sequence is SEQ ID NO: 1242 or SEQ ID NO: 60. 127. A method of treating a disease in a subject, the method comprising: administering to the subject a composition comprising the expression cassette of any one of embodiments 1-79; delivering the expression cassette to a cell of the subject; and expressing a small RNA payload in the cell, thereby treating the disease. 128. The method of any one of embodiments 112-127, wherein the disease is a synucleinopathy, Parkinson's disease, Lewy body dementia, multiple system atrophy, Charcot-Marie-Tooth disease, hereditary neuropathy with liability to pressure palsies, Yuan-Harel-Lupski syndrome, a tauopathy, Alzheimer's disease, frontotemporal dementia, progressive supranuclear palsy, corticobasal degeneration, chronic traumatic encephalopathy, autism, traumatic brain injury, Dravet syndrome, Crohn's disease, muscular dystrophy, B-cell leukemia, Dejerine-Sottas disease, Stargardt disease, alpha-1 antitrypsin deficiency, Tay-Sachs disease, cystic fibrosis, liposomal acid lipase deficiency, or Gaucher disease. 129. The method of any one of embodiments 112-128, wherein the target sequence encodes α-synuclein (SNCA), peripheral myelin protein 22 (PMP22), double homeobox 4 (DUX4), leucine rich repeat kinase 2 (LRRK2), Tau (MAPT), progranulin (GRN), a duplication of the PMP22 associated with Charcot-Marie-Tooth disease type 1A (CMT1A), ATP-binding cassette sub-family A member 4 (ABCA4), amyloid precursor protein (APP), alpha-1 antitrypsin (SERPINA1), hexosaminidase A (HEXA), cystic fibrosis transmembrane conductance regulator (CFTR), lipase A (LIPA), glucosylceramidase beta (GBA), PTEN-induced kinase 1 (PINK1), or methyl CpG binding protein 2 (MECP2). 130. The method of any one of embodiments 112-129, wherein the small RNA payload comprises an engineered guide RNA that hybridizes to a target sequence, and wherein the cell encodes the target sequence. 131. The method of embodiment 130, further comprising forming a guide-target RNA scaffold upon hybridization of the engineered guide RNA to the target sequence, recruiting an editing enzyme to the target sequence, and editing the target sequence with the editing enzyme. 132. The method of embodiment 130 or embodiment 131, wherein the target sequence comprises a mutation relative to a wild type sequence. 133. The method of embodiment 132, wherein editing the target sequence corrects the mutation in the target sequence. 134. The method of embodiment 132 or embodiment 133, wherein the mutation is a missense mutation. 135. The method of embodiment 132 or embodiment 133, wherein the mutation is a nonsense mutation. 136. The method of any one of embodiments 132-135, wherein the mutation is a G to A mutation. 137. The method of any one of embodiments 132-136, wherein the mutation is associated with the disease. 138. The method of any one of embodiments 132-137, wherein editing the target sequence comprises editing an untranslated region of the target. 139. The method of embodiment 138, wherein the untranslated region is a 5′ untranslated region or a 3′ untranslated region. 140. The method of embodiment 139, wherein the 3′ untranslated region is a polyadenylation sequence. 141. The method of any one of embodiments 131-140, wherein editing the target sequence comprises editing a translation initiation site. 142. The method of any one of embodiments 131-141, wherein editing the target sequence alters expression of the target sequence. 143. The method of embodiment 142, wherein editing the target sequence increases expression of the target sequence. 144. The method of embodiment 142, wherein editing the target sequence decreases expression of the target sequence. 145. The method of any one of embodiments 81-111 or 131-144, wherein the guide-target RNA scaffold comprises a structural feature. 146. The method of embodiment 145, wherein the structural feature is a bulge, a mismatch, an internal loop, a hairpin, or combinations thereof. 147. The method of embodiment 145, wherein the structural feature comprises the bulge, and wherein the bulge is a symmetric bulge. 148. The method of embodiment 145, wherein the structural feature comprises the bulge, and wherein the bulge is an asymmetric bulge. 149. The method of any one of embodiments 145-148, wherein the structural feature comprises the internal loop, and wherein the internal loop is a symmetric internal loop. 150. The method of any one of embodiments 145-149, wherein the structural feature comprises the internal loop, and wherein the internal loop is an asymmetric internal loop. 151. The method of any one of embodiments 145-150, wherein the structural feature comprises the hairpin, and wherein the hairpin is a recruitment hairpin or a non-recruitment hairpin. 152. The method of any one of embodiments 81-111 or 131-151, wherein the guide-target RNA scaffold comprises a Wobble base pair. 153. The method of any one of embodiments 81-111 or 131-152, wherein the editing enzyme comprises an ADAR, an APOBEC, or a Cas nuclease. 154. The method of embodiment 153, wherein the ADAR comprises ADAR1, ADAR2, ADAR3, or combinations thereof. 155. The method of any one of embodiments 81-111 or 131-154, wherein the target sequence comprises RNA or DNA. 156. The method of any one of embodiments 81-111 or 131-155, wherein the target sequence is a mRNA or a pre-mRNA. 157. The method of any one of embodiments 81-111 or 131-156, wherein editing the target sequence comprises deamidating a nucleotide of the target sequence. 158. The method of any one of embodiments 81-111 or 131-157, wherein the target sequence is edited with an efficiency of at least 10%, at least 20%, or at least 25%. 159. The method of any one of embodiments 81-158, wherein the expression cassette is delivered to the cell via a viral vector. 160. The method of embodiment 159, wherein the viral vector is an adenoviral vector, an adeno-associated viral vector, or a lentivector. 161. The method of embodiment 160, wherein the adeno-associated viral vector is selected from the group consisting of AAV1, AAV2, AAV3, AAV4, AAV5, AAV6, AAV7, AAV8, AAV9, AAV 10, AAV11, AAV12, AAV13, AAV14, AAV15, AAV16, AAV-DJ, AAV-DJ/8, AAV-DJ/9, AAV1/2, AAV.rh8, AAV.rh10, AAV.rh20, AAV.rh39, AAV.Rh43, AAV.Rh74, AAV.v66, AAV.Oligo001, AAV.SCH9, AAV.r3.45, AAV.RHM4-1, AAV.hu37, AAV.Anc80, AAV.Anc80L65, AAV.7m8, AAV.PhP.eB, AAV.PhP.V1, AAV.PHP.B, AAV.PhB.C1, AAV.PhB.C2, AAV.PhB.C3, AAV.PhB.C6, AAV.cy5, AAV2.5, AAV2tYF, AAV3B, AAV.LK03, AAV.HSC1, AAV.HSC2, AAV.HSC3, AAV.HSC4, AAV.HSC5, AAV.HSC6, AAV.HSC7, AAV.HSC8, AAV.HSC9, AAV.HSC10, AAV.HSC11, AAV.HSC12, AAV.HSC13, AAV.HSC14, AAV.HSC15, AAV.HSC16, AAV.HSC17, AAVhu68, chimeras thereof, and combinations thereof. 162. A viral vector encapsidating the expression cassette of any one of embodiments 1-79. 163. The viral vector of embodiment 162, wherein the viral vector is an adeno-associated viral vector. 164. The viral vector of embodiment 163, wherein the adeno-associated viral vector is selected from the group consisting of AAV1, AAV2, AAV3, AAV4, AAV5, AAV6, AAV7, AAV8, AAV9, AAV 10, AAV11, AAV12, AAV13, AAV14, AAV15, AAV16, AAV-DJ, AAV-DJ/8, AAV-DJ/9, AAV1/2, AAV.rh8, AAV.rh10, AAV.rh20, AAV.rh39, AAV.Rh43, AAV.Rh74, AAV.v66, AAV.Oligo001, AAV.SCH9, AAV.r3.45, AAV.RHM4-1, AAV.hu37, AAV.Anc80, AAV.Anc80L65, AAV.7m8, AAV.PhP.eB, AAV.PhP.V1, AAV.PHP.B, AAV.PhB.C1, AAV.PhB.C2, AAV.PhB.C3, AAV.PhB.C6, AAV.cy5, AAV2.5, AAV2tYF, AAV3B, AAV.LK03, AAV.HSC1, AAV.HSC2, AAV.HSC3, AAV.HSC4, AAV.HSC5, AAV.HSC6, AAV.HSC7, AAV.HSC8, AAV.HSC9, AAV.HSC10, AAV.HSC11, AAV.HSC12, AAV.HSC13, AAV.HSC14, AAV.HSC15, AAV.HSC16, AAV.HSC17, AAVhu68, chimeras thereof, and combinations thereof. 165. A pharmaceutical composition comprising the expression cassette of any one of embodiments 1-79 or the viral vector of any one of embodiments 162-164 and a pharmaceutically acceptable excipient, carrier, diluent, or combination thereof.

### EXAMPLES

[0482] The invention is further illustrated by the following non-limiting examples.

### Example 1

### Engineered Promoter Variants for Expression of Engineered Guide RNAs

[0483] This example describes engineered promoter variants for expression of engineered guide RNAs, which are operably linked to small nuclear RNAs (snRNAs). Expression constructs were designed based on either a mouse U7 (mU7) promoter (FIG. 1A), such as SEQ ID NO: 15 (TAACAACATAGGAGCTGTGATTGGCTGTTTTCAGCCAATCAGCACTGACTCATTTG CATAGCCTTTACAAGCGGTCACAAACTCAAGAAACGAGCGGTTTTAATAGTCTTTTA GAATATTGTTTATCGAACCGAATAAGGAACTGTGCTTTGTGATTCACATATCAGTGG AGGGGTGTGGAAATGGCACCTTGATCTCACCCTCATCGAAAGTGGAGTTGATGTCC TTCCCTGGCTCGCTACAGACGCACTTCCGC), or a human U1 (hU1) promoter (FIG. 1B), such as SEQ ID NO: 13 (TAAGGACCAGCTTCTTTGGGAGAGAACAGACGCAGGGGCGGGAGGGAAAAAGGG AGAGGCAGACGTCACTTCCTCTTGGCGACTCTGGCAGCAGATTGGTCGGTTGAGTG GCAGAAAGGCAGACGGGGACTGGGCAAGGCACTGTCGGTGACATCACGGACAGGG CGACTTCTATGTAGATGAGGCAGCGCAGAGGCTGCTGCTTCGCCACTTGCTGCTTCG CCACGAAGGGAGTTCCCGTGCCCTGGGAGCGGGTTCAGGACCGCTGATCGGAAGTG AGAATCCCAGCTGTGTGTCAGGGCTGGAAAGGGCTCGGGAGTGCGCGGGGCAAGT GACCGTGTGTGTAAAGAGTGAGGCGTATGAGGCTGTGTCGGGGCAGAGCCCGAAG ATCTC). Elements of the mU7 and hU1 promoters, including the zinc finger 143 motif that binds a ZNF143 transcription factor, the OCT-1 transcription factor binding site, and the proximal sequence element (PSE) that recruits SNAPc and phosphorylated RNA polymerase II transcriptional machinery, were engineered to increase expression of downstream payload sequences, including engineered guide RNAs designed to hybridize to a target RNA and an Sm binding sequence (smOPT) that binds Sm proteins to form small nuclear ribonucleoprotein (snRNP) particles. Engineered guide RNAs form a guide-targeted RNA scaffold upon binding of the guide RNA to a target RNA, and thereby facilitate editing of a target adenosine (A) in the target RNA to inosine (I) by adenosine deaminase acting on RNA (ADAR). The smOPT facilitates nuclear trafficking of linked RNA sequences, including the engineered guide RNAs.

[0484] Constructs were screened for engineered guide RNA expression using a luciferase reporter assay. A Kozak competition reporter construct (FIG. 2A) containing an ATG initiation site that is deaminated to ITG, which is read as GTG, in the presence of expressed engineered guide RNA was used as an assay readout. In the absence of start codon deamination, the CDS1 was translated. Deamination of the start codon from ATG to ITG, facilitated by the expressed engineered guide RNA, disrupted CDS1 translation. Instead, a luciferase (“NanoLuc”) was translated. Luciferase activity was used as a readout of engineered guide RNA expression and engineered guide RNA-dependent editing. As shown in FIG. 2B, the unedited construct (“ATG unedited”) led to lower luciferase activity than the edited construct (“GTG Edited”). Reporter constructs of SEQ ID NO: 49 (CCAAGATGGATGGGAGATGCTAAATTTTTAATGCCAGAGCTAAGAATGTCTGCTTT GTCCAATGGTTAAATGAGTGTACACTTAAGAGAGTCTCACACTTTGGAGGGTTTCTC ATGATTTTTCAGTGTTTTTTGTTTATTTTTCCCCGAAAGTTCTCATTCAAAGTGTATTT TATGTTTTCCAGTGTGGTGTAAAGGAATTCATTAGCCATGGATGTATTCATGAAAGG ACTTTCAAAGGCCAAGGAGGGAGTTGTGGCTGCTGCTGAGAAGACCAAACAGGGTG TGGCAGAAGCAGCAGGAAAGACAAAGGAGGGTGTTCTCTATGTAGGTAGGGAAAC CCCAAATGTCAGTTTGGTGCTTGTTCATGAGAGATGGGTTAGGATAATCAATACTCT AAATGCTGGTAGTTCTCTCTCTGACTACAAGGACGACGACGACAAGT; “fSNCA-pre (ATG)”), and SEQ ID NO: 50 (GGGAGGAGCTTGCTTCTCCATTCTGGTGTGATCCAGGAACAGCTGTCTTCCAGCTCT GAATGTGGTGTAAAGGAATTCATTAGCCATGGATGTATTCATGAAAGGACTTTCAA AGGCCAAGGAGGGAGTTGTGGCTGCTGCTGAGAAGACCAAACAGGGTGTGGCAGA AGCAGCAGGAAAGACAAAGGAGGGTGTTCTCTATGTAGGCTCCAAGACCAAGGAG GGAGTGGTGCATGGTGTGGCAACAGTGGCTGAGAAGACCAAAGAGCAAGTGACAA ATGTTGGAGGAGCAGTGGTGACGGGTGTGACAGCAGTAGCCCAGAAGACAGTGGA GGGAGCAGGGAGCATTGCAGCAGCCACTGGCTTTGTCAAGAAGGACCAGTTGGGCA AG; “fSNCA-cDNA (ATG)”) were designed to test an engineered guide RNA targeting α-synuclein (SNCA), and a reporter construct of SEQ ID NO: 48 (AGTTACAGGGAGCACCACCAGGGAACATCTCGGGGAGCCTGGTTGGAAGCTGCAG GCTTAGTCTGTCGGCTGCGGGTCTCTGACTGCCCTGTGGGGAGGGTCTTGCCTTAAC ATCCCTTGCATTTGGCTGCAAAGAAATCTGCTTGGAAGAAGGGGTTACGCTGTTTGG CCGGGCAGAAACTCCGCTGAGCAGAACTTGCCGCCAGAGTGCTCCTCCTGTTGCTG AGTATCATCGTCCTCCACGTCGCGGTGCTGGTGCTGCTGTTCGTCTCCACGATCGTC AGCCAATGGATCGTGGGCAATGGACACGCAACTGATCTCTGGCAGAACTGTAGCAC CTCTTCCTCAGGAAATGTCCACCACTGTTTCTCATCATCACCAAACGAATGGCTGCA GTCTGTCCAGGCCACC; “fPMP22-cDNA (ATG)”) was designed to test an engineered guide RNA targeting PMP22. The PMP22 and SNCA reporters showed increased luciferase activity upon conversion of the ATG to GTG (FIG. 3).

[0485] The workflow illustrated in FIG. 4 was used to screen engineered guide RNA constructs for guide RNA expression and editing. Cells were seeded at 5×10⁴ per 96-well, and transiently transfected with 300 ng of plasmid encoding an engineered guide RNA construct and a reporter construct. For luciferase reporter assays, luciferase activity was measured. Additional assays, including mirVANA total RNA isolation, DNaseI treatment, ddPCR guide quantification, and Sanger editing were performed for additional validation of the luciferase assay.

### Example 2

### Engineered Guide RNA Expression Constructs with Engineered OCT-1 Binding Sites

[0486] This example describes engineered guide RNA expression constructs with distal sequence elements (DSEs) comprising engineered OCT-1 binding sites. The OCT-1 binding site (SEQ ID NO: 21) of a mU7 promoter (SEQ ID NO: 15; TAACAACATAGGAGCTGTGATTGGCTGTTTTCAGCCAATCAGCACTGACTCATTTGC ATAGCCTTTACAAGCGGTCACAAACTCAAGAAACGAGCGGTTTTAATAGTCTTTTAG AATATTGTTTATCGAACCGAATAAGGAACTGTGCTTTGTGATTCACATATCAGTGGA GGGGTGTGGAAATGGCACCTTGATCTCACCCTCATCGAAAGTGGAGTTGATGTCCTT CCCTGGCTCGCTACAGACGCACTTCCGC) was replaced with various engineered OCT-1 binding sites, and expression of the SNCA-targeting guide RNA construct (SEQ ID NO: 1274; GACCGGCCACAACTCCCTCCTTGGCCTTTGAAAGTCCTTTCATGAATACATCCACGG CTAATGAATTCCTTTACACCACACTGGAAAACATAAAATACACTTTGAGTGGAATTT TTGGAGCAGGTTTTCTGACTTCGGTCGGAAAACCCCT) under control of the mU7 promoter was quantified using the luciferase reporter assay described in EXAMPLE 1. The effects of sequence changes as well as duplications were assayed. Duplicated sequences included two of the same OCT-1 binding sequence separated by an 8-nucleotide residue spacer. A random sequence (SEQ ID NO: 45) and a duplicated random sequence (SEQ ID NO: 46), were added in place of the OCT-1 binding sequence as a control that did not bind OCT-1 transcription factor. A construct encoding only a GFP cassette (“GFP ctrl”) was used as a negative control. Sequences of the tested OCT-1 binding sites are provided in TABLE 11.

TABLE 11
OCT-1 Binding Sequences

| SEQ ID NO: | Sequence |
|---|---|
| SEQ ID NO: 21 | ATTTGCAT |
| SEQ ID NO: 27 | ATGCAAAT |
| SEQ ID NO: 28 | ATGCAAATCAAGAGAAATGCAAAT |
| SEQ ID NO: 29 | ATGCATATTCAGCAAGAGAACTGCATATTCAT |
| SEQ ID NO: 30 | ATTTGCATCAAGAGAAATTTGCAT |
| SEQ ID NO: 45 | CGTAGTAC |
| SEQ ID NO: 46 | CGTAGTACCAAGAGAACGTAGTAC |

[0487] Fold change in luciferase activity relative to the original mU7 promoter sequence, which was used as a readout for guide RNA expression, was measured for each OCT-1 variant, as shown in FIG. 5. The construct with the OCT-1 binding site of SEQ ID NO: 28, corresponding to a duplicated OCT-1 binding site of SEQ ID NO: 27 showed the greatest increase in guide RNA expression relative to the original mU7 construct.

### Example 3

### Engineered Guide RNA Expression Constructs with Engineered Zinc Finger 143 Motifs

[0488] This example describes engineered guide RNA expression constructs with engineered zinc finger 143 motifs. The zinc finger 143 motif (SEQ ID NO: 20) of a mU7 promoter (SEQ ID NO: 15) was replaced with various engineered zinc finger 143 motifs, and expression of the SNCA-targeting guide RNA construct with an engineered mU7 termination sequence (SEQ ID NO: 1274) under control of the mU7 promoter was quantified using the luciferase reporter assay described in EXAMPLE 1. A random sequence (SEQ ID NO: 43) was added in place of the zinc finger 143 motif as a control that did not bind ZNF143 transcription factor. A construct encoding only a GFP cassette (“GFP ctrl”) was used as a negative control. Sequences of the tested zinc finger 143 motifs are provided in TABLE 12.

TABLE 12
Zinc Finger 143 Motifs

| SEQ ID NO: | Sequence |
|---|---|
| SEQ ID NO: 20 | GCCAATCAGCA |
| SEQ ID NO: 24 | ACTACAATTCCCAGC |
| SEQ ID NO: 25 | TTCCCAGCATGCCCCGCGC |
| SEQ ID NO: 26 | TACCCACAATGCCCTGC |
| SEQ ID NO: 43 | GTTACGCTTAGAATGGC |

[0489] Fold change in luciferase activity relative to the original mU7 promoter sequence, which was used as a readout for guide RNA expression, was measured for each zinc finger 143 variant, as shown in FIG. 6. None of the zinc finger 143 variants showed a significant change in guide RNA expression relative to the original mU7 construct.

### Example 4

### Engineered Guide RNA Expression Constructs with Engineered Proximal Sequence Elements

[0490] This example describes engineered guide RNA expression constructs with engineered proximal sequence elements (PSEs). The PSE (SEQ ID NO: 22) of a mU7 promoter (SEQ ID NO: 15) was replaced with various PSEs, and expression of the SNCA-targeting guide RNA construct (SEQ ID NO: 1274) under control of the mU7 promoter was quantified using the luciferase reporter assay described in EXAMPLE 1. A random sequence (SEQ ID NO: 44) was added in place of the PSE as a control that did not recruit the transcription factor SNAPc. A construct encoding only a GFP cassette (“GFP ctrl”) was used as a negative control. Sequences of the tested PSEs are provided in TABLE 13.

TABLE 13
Proximal Sequence Elements

| SEQ ID NO: | Sequence |
|---|---|
| SEQ ID NO: 22 | CTCACCCTCATCGAAAGTGG |
| SEQ ID NO: 31 | AAGTCACCATGAGTGTAAAGGG |
| SEQ ID NO: 32 | AGGTCACCGTAACTATAAAAGA |
| SEQ ID NO: 33 | ACTTGACCTAAGTGTAAAGTT |
| SEQ ID NO: 34 | AAGTTACCATTACCCGTTTAGG |
| SEQ ID NO: 35 | AAATCACCATAAACGTGAAATG |
| SEQ ID NO: 36 | AAGTGACCTTGCGTGTAAAGGG |
| SEQ ID NO: 37 | AATGATCCTATATTTAGAGTGG |
| SEQ ID NO: 44 | CTGACAATGGCTACAGTCGA |

[0491] Fold change in luciferase activity relative to the original mU7 promoter sequence, which was used as a readout for guide RNA expression, was measured for each PSE variant, as shown in FIG. 7. The construct with the PSE of SEQ ID NO: 31 showed the greatest increase in guide RNA expression relative to the original mU7 construct.

### Example 5

### Engineered Guide RNA Expression Constructs with Engineered Transcription Termination Sequences

[0492] This example describes engineered guide RNA expression constructs with engineered 3′ box sequence elements. The 3′ box sequence element (SEQ ID NO: 23) of a mU7 promoter (SEQ ID NO: 15) was replaced with various engineered termination sequences, and expression of the SNCA-targeting guide RNA construct (SEQ ID NO: 1274) under control of the mU7 promoter was quantified using the luciferase reporter assay described in EXAMPLE 1. A random sequence (SEQ ID NO: 47) was added in place of the 3′ box sequence element as a control that lacked a termination sequence. A construct encoding only a GFP cassette (“GFP ctrl”) was used as a negative control. Sequences of the tested termination sequences are provided in TABLE 14.

TABLE 14
3′ Box Element Sequences

| SEQ ID NO: | Sequence |
|---|---|
| SEQ ID NO: 23 | GTCTACAATGAAAGC |
| SEQ ID NO: 40 | GTTTAATAAAAATAGA |
| SEQ ID NO: 41 | GTTTCAAAAACAGA |
| SEQ ID NO: 42 | GTTCAATGGCTGA |
| SEQ ID NO: 47 | ACTGGATTCAGTACGTACGTA |

[0493] Fold change in luciferase activity relative to the original mU7 promoter sequence, which was used as a readout for guide RNA expression, was measured for each termination sequence variant, as shown in FIG. 8. The construct with the termination sequence of SEQ ID NO: 41 showed the greatest increase in guide RNA expression relative to the original mU7 construct.

### Example 6

### Combining Engineered Promoter Sequence Elements for Increased Engineered Guide RNA Expression

[0494] This example describes combining engineered promoter sequence elements for increased engineered guide RNA expression. The highest performing engineered promoter sequence elements identified in EXAMPLE 2-EXAMPLE 5 were tested in combination to identify combinations of elements that improved expression of either a PMP22-targeting engineered guide RNA (SEQ ID NO: 1273; GACCGCACCAGCACCGCGACGTGGAGGACGATGATACTCAGCAACAGGAGGAGCC CACTGGCGGCAAGTTCTGCTCAGCGGAGTTTCTGCCCGGCCAAACAGCGTGTGGAA TTTTTGGAGCAGGTTTTCTGACTTCGGTCGGAAAACCCCT) or an SNCA-targeting engineered guide RNA (e.g., SEQ ID NO: 1274 or SEQ ID NO: 1290). Constructs containing a distal sequence element (DSE) with a wild type zinc finger 143 motif of SEQ ID NO: 20, a wild type OCT-1 transcription factor binding sequence of SEQ ID NO: 21 or a variant OCT-1 transcription factor binding sequence of SEQ ID NO: 28, a wild type PSE of SEQ ID NO: 22 or a variant PSE of SEQ ID NO: 31, and a wild type 3′ box sequence element of SEQ ID NO: 23 or a variant3′ box sequence element of SEQ ID NO: 41. The screened expression cassettes encoding engineered guide RNA constructs are provided in TABLE 15.

TABLE 15
Engineered Guide RNA Expression Constructs with Engineered Promoter
Elements

| SEQ ID | | |
|---|---|---|
| NO: | Sequence | Target |
| SEQ ID | TAACAACATAGGAGCTGTGATTGGCTGTTTTCAGCCAATCAGCACTG | PMP22 |
| NO: 1 | ACTCATTTGCATAGCCTTTACAAGCGGTCACAAACTCAAGAAACGAG | |
| | CGGTTTTAATAGTCTTTTAGAATATTGTTTATCGAACCGAATAAGGAA | |
| | CTGTGCTTTGTGATTCACATATCAGTGGAGGGGTGTGGAAATGGCAC | |
| | CTTGATCTCACCCTCATCGAAAGTGGAGTTGATGTCCTTCCCTGGCTC | |
| | GCTACAGACGCACTTCCGCGACCGCACCAGCACCGCGACGTGGAGGA | |
| | CGATGATACTCAGCAACAGGAGGAGCCCACTGGCGGCAAGTTCTGCT | |
| | CAGCGGAGTTTCTGCCCGGCCAAACAGCGTGTGGAATTTTTGGAGCA | |
| | GGTTTTCTGACTTCGGTCGGAAAACCCCTCCCAATTTCACTGGTCTAC | |
| | AATGAAAGCAAAACAGTTCTCTTCCCCGCTCCCCGGTGTGTGAGAGG | |
| | GGCTTTGATCCTTCTCTGGTTTCCTAGGAAACGCGTATGTG | |
| SEQ ID | TAACAACATAGGAGCTGTGATTGGCTGTTTTCAGCCAATCAGCACTG | PMP22 |
| NO: 2 | ACTCATTTGCATAGCCTTTACAAGCGGTCACAAACTCAAGAAACGAG | |
| | CGGTTTTAATAGTCTTTTAGAATATTGTTTATCGAACCGAATAAGGAA | |
| | CTGTGCTTTGTGATTCACATATCAGTGGAGGGGTGTGGAAATGGCAC | |
| | CTTGATAAGTCACCATGAGTGTAAAGGGAGTTGATGTCCTTCCCTGGC | |
| | TCGCTACAGACGCACTTCCGCGACCGCACCAGCACCGCGACGTGGAG | |
| | GACGATGATACTCAGCAACAGGAGGAGCCCACTGGCGGCAAGTTCTG | |
| | CTCAGCGGAGTTTCTGCCCGGCCAAACAGCGTGTGGAATTTTTGGAG | |
| | CAGGTTTTCTGACTTCGGTCGGAAAACCCCTCCCAATTTCACTGGTCT | |
| | ACAATGAAAGCAAAACAGTTCTCTTCCCCGCTCCCCGGTGTGTGAGA | |
| | GGGGCTTTGATCCTTCTCTGGTTTCCTAGGAAACGCGTATGTG | |
| SEQ ID | TAACAACATAGGAGCTGTGATTGGCTGTTTTCAGCCAATCAGCACTG | PMP22 |
| NO: 3 | ACTCATTTGCATAGCCTTTACAAGCGGTCACAAACTCAAGAAACGAG | |
| | CGGTTTTAATAGTCTTTTAGAATATTGTTTATCGAACCGAATAAGGAA | |
| | CTGTGCTTTGTGATTCACATATCAGTGGAGGGGTGTGGAAATGGCAC | |
| | CTTGATCTCACCCTCATCGAAAGTGGAGTTGATGTCCTTCCCTGGCTC | |
| | GCTACAGACGCACTTCCGCGACCGCACCAGCACCGCGACGTGGAGGA | |
| | CGATGATACTCAGCAACAGGAGGAGCCCACTGGCGGCAAGTTCTGCT | |
| | CAGCGGAGTTTCTGCCCGGCCAAACAGCGTGTGGAATTTTTGGAGCA | |
| | GGTTTTCTGACTTCGGTCGGAAAACCCCTCCCAATTTCACTGGTTTCA | |
| | AAAACAGAAAAACAGTTCTCGTTTCAAAAACAGATTCCCCGCTCCCC | |
| | GGTGTGTGAGAGGGGCTTTGATCCTTCTCTGGTTTCCTAGGAAACGCG | |
| | TATGTG | |
| SEQ ID | TAACAACATAGGAGCTGTGATTGGCTGTTTTCAGCCAATCAGCACTG | PMP22 |
| NO: 4 | ACTCATTTGCATAGCCTTTACAAGCGGTCACAAACTCAAGAAACGAG | |
| | CGGTTTTAATAGTCTTTTAGAATATTGTTTATCGAACCGAATAAGGAA | |
| | CTGTGCTTTGTGATTCACATATCAGTGGAGGGGTGTGGAAATGGCAC | |
| | CTTGATAAGTCACCATGAGTGTAAAGGGAGTTGATGTCCTTCCCTGGC | |
| | TCGCTACAGACGCACTTCCGCGACCGCACCAGCACCGCGACGTGGAG | |
| | GACGATGATACTCAGCAACAGGAGGAGCCCACTGGCGGCAAGTTCTG | |
| | CTCAGCGGAGTTTCTGCCCGGCCAAACAGCGTGTGGAATTTTTGGAG | |
| | CAGGTTTTCTGACTTCGGTCGGAAAACCCCTCCCAATTTCACTGGTTT | |
| | CAAAAACAGAAAAACAGTTCTCTTCCCCGCTCCCCGGTGTGTGAGAG | |
| | GGGCTTTGATCCTTCTCTGGTTTCCTAGGAAACGCGTATGTG | |
| SEQ ID | TAACAACATAGGAGCTGTGATTGGCTGTTTTCAGCCAATCAGCACTG | PMP22 |
| NO: 5 | ACTCATGCAAATCAAGAGAAATGCAAATAGCCTTTACAAGCGGTCAC | |
| | AAACTCAAGAAACGAGCGGTTTTAATAGTCTTTTAGAATATTGTTTAT | |
| | CGAACCGAATAAGGAACTGTGCTTTGTGATTCACATATCAGTGGAGG | |
| | GGTGTGGAAATGGCACCTTGATAAGTCACCATGAGTGTAAAGGGAGT | |
| | TGATGTCCTTCCCTGGCTCGCTACAGACGCACTTCCGCGACCGCACCA | |
| | GCACCGCGACGTGGAGGACGATGATACTCAGCAACAGGAGGAGCCC | |
| | ACTGGCGGCAAGTTCTGCTCAGCGGAGTTTCTGCCCGGCCAAACAGC | |
| | GTGTGGAATTTTTGGAGCAGGTTTTCTGACTTCGGTCGGAAAACCCCT | |
| | CCCAATTTCACTGGTTTCAAAAACAGAAAAACAGTTCTCTTCCCCGCT | |
| | CCCCGGTGTGTGAGAGGGGCTTTGATCCTTCTCTGGTTTCCTAGGAAA | |
| | CGCGTATGTG | |
| SEQ ID | TAACAACATAGGAGCTGTGATTGGCTGTTTTCAGCCAATCAGCACTG | SNCA |
| NO: 6 | ACTCATTTGCATAGCCTTTACAAGCGGTCACAAACTCAAGAAACGAG | |
| | CGGTTTTAATAGTCTTTTAGAATATTGTTTATCGAACCGAATAAGGAA | |
| | CTGTGCTTTGTGATTCACATATCAGTGGAGGGGTGTGGAAATGGCAC | |
| | CTTGATCTCACCCTCATCGAAAGTGGAGTTGATGTCCTTCCCTGGCTC | |
| | GCTACAGACGCACTTCCGCGACCGGCCACAACTCCCTCCTTGGCCTTT | |
| | GAAAGTCCTTTCATGAATACATCCACGGCTAATGAATTCCTTTACACC | |
| | ACACTGGAAAACATAAAATACACTTTGAGTGGAATTTTTGGAGCAGG | |
| | TTTTCTGACTTCGGTCGGAAAACCCCTCCCAATTTCACTGGTCTACAA | |
| | TGAAAGCAAAACAGTTCTCTTCCCCGCTCCCCGGTGTGTGAGAGGGG | |
| | CTTTGATCCTTCTCTGGTTTCCTAGGAAACGCGTATGTG | |
| SEQ ID | TAAGGACCAGCTTCTTTGGGAGAGAACAGACGCAGGGGGGGGAGGG | SNCA |
| NO: 7 | AAAAAGGGAGAGGCAGACGTCACTTCCTCTTGGCGACTCTGGCAGCA | |
| | GATTGGTCGGTTGAGTGGCAGAAAGGCAGACGGGGACTGGGCAAGG | |
| | CACTGTCGGTGACATCACGGACAGGGCGACTTCTATGTAGATGAGGC | |
| | AGCGCAGAGGCTGCTGCTTCGCCACTTGCTGCTTCGCCACGAAGGGA | |
| | GTTCCCGTGCCCTGGGAGCGGGTTCAGGACCGCTGATCGGAAGTGAG | |
| | AATCCCAGCTGTGTGTCAGGGCTGGAAAGGGCTCGGGAGTGCGCGGG | |
| | GCAAGTGACCGTGTGTGTAAAGAGTGAGGCGTATGAGGCTGTGTCGG | |
| | GGCAGAGCCCGAAGATCTCACCGGCCACAACTCCCTCCTTGGCCTTT | |
| | GAAAGTCCTTTCATGAATACATCCACGGCTAATGAATTCCTTTACACC | |
| | ACACTGGAAAACATAAAATACACTTTGAGTGGAATTTTTGGAGCAGG | |
| | TTTTCTGACTTCGGTCGGAAAACCCCTCCCAATTTCACTGGTCTACAA | |
| | TGAAAGCAAAACAGTTCTCTTCCCCGCTCCCCGGTGTGTGAGAGGGG | |
| | CTTTGATCCTTCTCTGGTTTCCTAGGAAACGCGTATGTG | |
| SEQ ID | TTAACAACAACGAAGGGGCTGTGACTGGCTGCTTTCTCAACCAATCA | SNCA |
| NO: 8 | GCACCGAACTCATTTGCATGGGCTGAGAACAAATGTTCGCGAACTCT | |
| | AGAAATGAATGACTTAAGTAAGTTCCTTAGAATATTATTTTTCCTACT | |
| | GAAAGTTACCACATGCGTCGTTGTTTATACAGTAATAGGAACAAGAA | |
| | AAAAGTCACCTAAGCTCACCCTCATCAATTGTGGAGTTCCTTTATATC | |
| | CCATCTTCTCTCCAAACACATACGCAGACCGGCCACAACTCCCTCCTT | |
| | GGCCTTTGAAAGTCCTTTCATGAATACATCCACGGCTAATGAATTCCT | |
| | TTACACCACACTGGAAAACATAAAATACACTTTGAGTGGAATTTTTG | |
| | GAGCAGGTTTTCTGACTTCGGTCGGAAAACCCCTCCCAATTTCACTGG | |
| | TCTACAATGAAAGCAAAACAGTTCTCTTCCCCGCTCCCCGGTGTGTGA | |
| | GAGGGGCTTTGATCCTTCTCTGGTTTCCTAGGAAACGCGTATGTG | |
| SEQ ID | TAACAACATAGGAGCTGTGATTGGCTGTTTTCAGCCAATCAGCACTG | SNCA |
| NO: 9 | ACTCATTTGCATAGCCTTTACAAGCGGTCACAAACTCAAGAAACGAG | |
| | CGGTTTTAATAGTCTTTTAGAATATTGTTTATCGAACCGAATAAGGAA | |
| | CTGTGCTTTGTGATTCACATATCAGTGGAGGGGTGTGGAAATGGCAC | |
| | CTTGATAAGTCACCATGAGTGTAAAGGGAGTTGATGTCCTTCCCTGGC | |
| | TCGCTACAGACGCACTTCCGCGACCGGCCACAACTCCCTCCTTGGCCT | |
| | TTGAAAGTCCTTTCATGAATACATCCACGGCTAATGAATTCCTTTACA | |
| | CCACACTGGAAAACATAAAATACACTTTGAGTGGAATTTTTGGAGCA | |
| | GGTTTTCTGACTTCGGTCGGAAAACCCCTCCCAATTTCACTGGTCTAC | |
| | AATGAAAGCAAAACAGTTCTCTTCCCCGCTCCCCGGTGTGTGAGAGG | |
| | GGCTTTGATCCTTCTCTGGTTTCCTAGGAAACGCGTATGTG | |
| SEQ ID | TAACAACATAGGAGCTGTGATTGGCTGTTTTCAGCCAATCAGCACTG | SNCA |
| NO: 10 | ACTCATTTGCATAGCCTTTACAAGCGGTCACAAACTCAAGAAACGAG | |
| | CGGTTTTAATAGTCTTTTAGAATATTGTTTATCGAACCGAATAAGGAA | |
| | CTGTGCTTTGTGATTCACATATCAGTGGAGGGGTGTGGAAATGGCAC | |
| | CTTGATCTCACCCTCATCGAAAGTGGAGTTGATGTCCTTCCCTGGCTC | |
| | GCTACAGACGCACTTCCGCGACCGGCCACAACTCCCTCCTTGGCCTTT | |
| | GAAAGTCCTTTCATGAATACATCCACGGCTAATGAATTCCTTTACACC | |
| | ACACTGGAAAACATAAAATACACTTTGAGTGGAATTTTTGGAGCAGG | |
| | TTTTCTGACTTCGGTCGGAAAACCCCTCCCAATTTCACTGGTTTCAAA | |
| | AACAGAAAAACAGTTCTCGTTTCAAAAACAGATTCCCCGCTCCCCGG | |
| | TGTGTGAGAGGGGCTTTGATCCTTCTCTGGTTTCCTAGGAAACGCGTA | |
| | TGTG | |
| SEQ ID | TAACAACATAGGAGCTGTGATTGGCTGTTTTCAGCCAATCAGCACTG | SNCA |
| NO: 11 | ACTCATTTGCATAGCCTTTACAAGCGGTCACAAACTCAAGAAACGAG | |
| | CGGTTTTAATAGTCTTTTAGAATATTGTTTATCGAACCGAATAAGGAA | |
| | CTGTGCTTTGTGATTCACATATCAGTGGAGGGGTGTGGAAATGGCAC | |
| | CTTGATAAGTCACCATGAGTGTAAAGGGAGTTGATGTCCTTCCCTGGC | |
| | TCGCTACAGACGCACTTCCGCGACCGGCCACAACTCCCTCCTTGGCCT | |
| | TTGAAAGTCCTTTCATGAATACATCCACGGCTAATGAATTCCTTTACA | |
| | CCACACTGGAAAACATAAAATACACTTTGAGTGGAATTTTTGGAGCA | |
| | GGTTTTCTGACTTCGGTCGGAAAACCCCTCCCAATTTCACTGGTTTCA | |
| | AAAACAGAAAAACAGTTCTCTTCCCCGCTCCCCGGTGTGTGAGAGGG | |
| | GCTTTGATCCTTCTCTGGTTTCCTAGGAAACGCGTATGTG | |
| SEQ ID | TAACAACATAGGAGCTGTGATTGGCTGTTTTCAGCCAATCAGCACTG | SNCA |
| NO: 12 | ACTCATGCAAATCAAGAGAAATGCAAATAGCCTTTACAAGCGGTCAC | |
| | AAACTCAAGAAACGAGCGGTTTTAATAGTCTTTTAGAATATTGTTTAT | |
| | CGAACCGAATAAGGAACTGTGCTTTGTGATTCACATATCAGTGGAGG | |
| | GGTGTGGAAATGGCACCTTGATAAGTCACCATGAGTGTAAAGGGAGT | |
| | TGATGTCCTTCCCTGGCTCGCTACAGACGCACTTCCGCGACCGGCCAC | |
| | AACTCCCTCCTTGGCCTTTGAAAGTCCTTTCATGAATACATCCACGGC | |
| | TAATGAATTCCTTTACACCACACTGGAAAACATAAAATACACTTTGA | |
| | GTGGAATTTTTGGAGCAGGTTTTCTGACTTCGGTCGGAAAACCCCTCC | |
| | CAATTTCACTGGTTTCAAAAACAGAAAAACAGTTCTCTTCCCCGCTCC | |
| | CCGGTGTGTGAGAGGGGCTTTGATCCTTCTCTGGTTTCCTAGGAAACG | |
| | CGTATGTG | |

[0495] The PMP22-targeting guide RNA expression construct of SEQ ID NO: 1 included a wild type zinc finger 143 motif of SEQ ID NO: 20, a wild type OCT-1 transcription factor binding sequence of SEQ ID NO: 21, a wild type PSE of SEQ ID NO: 22, and a wild type 3′ box sequence element of SEQ ID NO: 23. The PMP22-targeting guide RNA expression construct of SEQ ID NO: 2 included a wild type zinc finger 143 motif of SEQ ID NO: 20, a wild type OCT-1 transcription factor binding sequence of SEQ ID NO: 21, a variant PSE of SEQ ID NO: 31, and a wild type 3′ box sequence element of SEQ ID NO: 23. The PMP22-targeting guide RNA expression construct of SEQ ID NO: 3 included a wild type zinc finger 143 motif of SEQ ID NO: 20, a wild type OCT-1 transcription factor binding sequence of SEQ ID NO: 21, a wild type PSE of SEQ ID NO: 22, and two instances of a variant 3′ box sequence element of SEQ ID NO: 41. The PMP22-targeting guide RNA expression construct of SEQ ID NO: 4 included a wild type zinc finger 143 motif of SEQ ID NO: 20, a wild type OCT-1 transcription factor binding sequence of SEQ ID NO: 21, a variant PSE of SEQ ID NO: 31, and a variant 3′ box sequence element of SEQ ID NO: 41. The PMP22-targeting guide RNA expression construct of SEQ ID NO: 5 included a wild type zinc finger 143 motif of SEQ ID NO: 20, a variant OCT-1 transcription factor binding sequence of SEQ ID NO: 28, a variant PSE of SEQ ID NO: 31, and a variant 3′ box sequence element of SEQ ID NO: 41.

[0496] The SNCA-targeting guide RNA expression construct of SEQ ID NO: 6 included a wild type zinc finger 143 motif of SEQ ID NO: 20, a wild type OCT-1 transcription factor binding sequence of SEQ ID NO: 21, a wild type PSE of SEQ ID NO: 22, and a wild type 3′ box sequence element of SEQ ID NO: 23. The SNCA-targeting guide RNA expression construct of SEQ ID NO: 9 included a wild type zinc finger 143 motif of SEQ ID NO: 20, a wild type OCT-1 transcription factor binding sequence of SEQ ID NO: 21, a variant PSE of SEQ ID NO: 31, and a wild type 3′ box sequence element of SEQ ID NO: 23. The SNCA-targeting guide RNA expression construct of SEQ ID NO: 10 included a wild type zinc finger 143 motif of SEQ ID NO: 20, a wild type OCT-1 transcription factor binding sequence of SEQ ID NO: 21, a wild type PSE of SEQ ID NO: 22, and two instances of a variant 3′ box sequence element of SEQ ID NO: 41. The SNCA-targeting guide RNA expression construct of SEQ ID NO: 11 included a wild type zinc finger 143 motif of SEQ ID NO: 20, a wild type OCT-1 transcription factor binding sequence of SEQ ID NO: 21, a variant PSE of SEQ ID NO: 31, and a variant 3′ box sequence element of SEQ ID NO: 41. The SNCA-targeting guide RNA expression construct of SEQ ID NO: 12 included a wild type zinc finger 143 motif of SEQ ID NO: 20, a variant OCT-1 transcription factor binding sequence of SEQ ID NO: 28, a variant PSE of SEQ ID NO: 31, and a variant 3′ box sequence element of SEQ ID NO: 41.

[0497] Constructs expressing either the PMP22-targeting engineered guide RNA (FIG. 9A) or the SNCA-targeting engineered guide RNA (FIG. 9B) were screened using the luciferase assay described in EXAMPLE 1. Expression of the SNCA-targeting guide RNA was also tested under control of a human U1 promoter (SEQ ID NO: 13) and a human U7 promoter (SEQ ID NO: 14; TTAACAACAACGAAGGGGCTGTGACTGGCTGCTTTCTCAACCAATCAGCACCGAAC TCATTTGCATGGGCTGAGAACAAATGTTCGCGAACTCTAGAAATGAATGACTTAAG TAAGTTCCTTAGAATATTATTTTTCCTACTGAAAGTTACCACATGCGTCGTTGTTTAT ACAGTAATAGGAACAAGAAAAAAGTCACCTAAGCTCACCCTCATCAATTGTGGAGT TCCTTTATATCCCATCTTCTCTCCAAACACATACGCA). A construct encoding only a GFP cassette (“GFP ctrl”) was used as a negative control.

[0498] For the PMP22-targeting engineered guide RNA, the construct with the wild type zinc finger 143 motif, the variant OCT-1 transcription factor binding sequence, the variant PSE, and the variant 3′ box sequence element (SEQ ID NO: 5) showed the greatest luciferase activity, indicative of highest guide RNA expression and RNA editing. For the SNCA-targeting engineered guide RNA, the construct with the wild type zinc finger 143 motif, the variant OCT-1 transcription factor binding sequence, the variant PSE, and the variant 3′ box sequence element (SEQ ID NO: 12) showed the greatest luciferase activity, indicative of highest guide RNA expression and RNA editing. These data suggest that the engineered promoter sequences of SEQ ID NO: 17 and SEQ ID NO: 16 effectively enhanced transcription of a payload sequence.

[0499] The results of the luciferase assay were verified using guide quantification (FIG. 10A and FIG. 10B for PMP22 and SNCA, respectively), Sanger editing of ATG (FIG. 11A and FIG. 11B for PMP22 and SNCA, respectively), and Sanger editing of the −3 or −5 position (FIG. 12A and FIG. 12B for PMP22 and SNCA, respectively). As measured by guide quantification and Sanger editing of the −3 position, the PMP22-targeting engineered guide RNA construct with the wild type zinc finger 143 motif, the wild OCT-1 transcription factor binding sequence, the variant PSE, and the variant 3′ box sequence element (SEQ ID NO: 4) showed the most guide RNA expression. As measured by Sanger editing of ATG, the PMP22-targeting engineered guide RNA construct with the wild type zinc finger 143 motif, the variant OCT-1 transcription factor binding sequence, the variant PSE, and the variant 3′ box sequence element (SEQ ID NO: 5) showed the most guide RNA expression. As measured by guide quantification, the SNCA-targeting engineered guide RNA construct with the wild type zinc finger 143 motif, the wild OCT-1 transcription factor binding sequence, the variant PSE, and the variant 3′ box sequence element (SEQ ID NO: 11) showed the most guide RNA expression. As measured by Sanger editing of ATG and Sanger editing of the −5 position, the SNCA-targeting engineered guide RNA construct with the wild type zinc finger 143 motif, the variant OCT-1 transcription factor binding sequence, the variant PSE, and the variant 3′ box sequence element (SEQ ID NO: 12) showed the most guide RNA expression.

[0500] The different quantification methods, luciferase activity, Sanger editing, and guide quantification, were compared by linear regression. As seen in FIG. 13A-FIG. 13C for SNCA-targeting constructs, assay results measured by guide quantification and luciferase activity (FIG. 13A), Sanger editing of ATG and luciferase activity (FIG. 13B), and guide quantification and Sanger editing of ATG (FIG. 13C) were well correlated. As seen in FIG. 14A-FIG. 14C for PMP22-targeting constructs, assay results measured by guide quantification and luciferase activity (FIG. 14A), Sanger editing of the −3 position and luciferase activity (FIG. 14B), and guide quantification and Sanger editing of the −3 position (FIG. 14C) were well correlated.

### Example 7

### Single Copy Integration of Engineered Guide RNA Expression Constructs

[0501] This example describes single copy integration of engineered guide RNA expression constructs. A single copy of each promoter variant was inserted into the genome of a HEK293T (FIG. 15, left) cell by plasmid transfection and single copy integration. The cells were enriched by Puromycin selection and thirteen days post transfection RNA was isolated, cDNA was generated and editing of different targets was assessed by ddPCR or Sanger sequencing. As shown in FIG. 15, the engineered promoters facilitated single copy integration of an engineered guide RNA targeting RAB7A (top right), GAPDH (middle right), and SNCA (bottom right). The results demonstrated that editing rates doubled when using an engineered promoter of SEQ ID NO: 17 and an engineered termination sequence of SEQ ID NO: 60 (which includes a 3′ box sequence element of SEQ ID NO: 41), as compared to a wild type mU7 promoter of SEQ ID NO: 15.

[0502] Single copy integration was used to control for copy number to evaluate the effect of engineered promoters on payload expression.

### Example 8

### Expression of Engineered Guide RNAs in Different Cell Types

[0503] This example describes expression of engineered guide RNAs in different cell types using an engineered expression cassette. In a first assay, engineered guide RNAs targeting either SNCA or PMP22 (SEQ ID NO: 1274 and SEQ ID NO: 1273, respectively) were inserted into either a wild type mouse U7 expression cassette or an engineered mouse U7 expression cassette and expressed in ARPE-19 cells (FIG. 17A). The SNCA and PMP22 wild type mouse expression cassettes had sequences of SEQ ID NO: 6 and SEQ ID NO: 1, respectively. The SNCA and PMP22 engineered mouse U7 expression cassettes had sequences of SEQ ID NO: 12 and SEQ ID NO: 5, respectively. The engineered mouse U7 expression cassettes of SEQ ID NO: 12 and SEQ ID NO: 5 each contained an engineered promoter of SEQ ID NO: 17, comprising an OCT-1 transcription factor binding sequence of SEQ ID NO: 28 and a PSE of SEQ ID NO: 31, and an engineered termination sequence of SEQ ID NO: 60, comprising a transcription termination sequence of SEQ ID NO: 41. As shown in FIG. 17A, the engineered mouse U7 expression cassettes (SEQ ID NO: 12 or SEQ ID NO: 5) enhanced expression of the SNCA-targeting guide RNA and PMP22-targeting guide RNA in ARPE-19 cells relative to the corresponding wild type mouse U7 expression cassettes (SEQ ID NO: 6 or SEQ ID NO: 1).

[0504] In a second assay, an engineered guide RNA targeting SERPINA1 (SEQ ID NO: 61; GACCGTAGACATGGGTATGGCCTCTAATTTGTAGGCCCCAGCAGCTTCAGTCCCTTA CTCGTCGTACCAGAGCACAGCCAGTCGTATGCACGGCGTGGAATTTTTGGAGCAGG TTTTCTGACTTCGGTCGGAAAACCCCT) was inserted into either a wild type mouse U7 expression cassette or an engineered mouse U7 expression cassette and expressed in HepG2 cells (FIG. 17B). The SERPINA1 engineered mouse U7 expression cassettes had a sequence of SEQ ID NO: 59. The engineered mouse U7 expression cassette of SEQ ID NO: 59 contained an engineered promoter of SEQ ID NO: 16, comprising a PSE of SEQ ID NO: 31, and an engineered termination sequence of SEQ ID NO: 60, comprising a transcription termination sequence of SEQ ID NO: 41. As shown in FIG. 17B, the engineered mouse U7 expression cassette (SEQ ID NO: 59) enhanced expression of the SERPINA1-targeting guide RNA in HepG2 cells relative to the corresponding wild type mouse U7 expression cassette.

[0505] Together, these data demonstrate that engineered expression cassettes comprising engineered promoters of SEQ ID NO: 16 or SEQ ID NO: 17 and engineered termination sequences of SEQ ID NO: 60 enhance RNA payload expression in multiple different cell types, including ARPE-19 cells and HepG2 cells.

### Example 9

### Modified U7 Promoters Provide Exon Skipping

[0506] The modified U7 promoter of SEQ ID NO: 17 and SEQ ID NO: 60 flanking the guide RNA-SmOPT or ASO on the 5′ and 3′ ends respectively was tested in human RD rhabdomyosarcoma cells (CCL-136). FIG. 18 shows the percent of RAB7A editing or DMD exon skipping by the indicated engineered guide RNA. RD cells were transfected with plasmid constructs expressing the antisense guide RNA from a human U1 promoter (SEQ ID NO: 13) or a modified U7 promoter (SEQ ID NO: 17) and a termination sequence of SEQ ID NO: 60, along with a plasmid expressing piggybac transposase for random integration into the genome. Successful integrations were identified by fluorescence expression and selected for. Cells were subsequently differentiated for 10 days into myocytes to express the full-length DMD Dp427m muscle isoform. Then, RAB7A editing or DMD exon skipping was measured using droplet digital PCR. Untransfected RD cells after 10 days of myocyte differentiation were used as a negative control.

[0507] Existing antisense oligonucleotides operably linked to SmOPT and U7 hairpin sequences are currently being used for exon skipping therapies, and function by physically masking intronic and exonic splice enhancer sequences. To demonstrate that the novel promoters of the present disclosure can also improve activity in this capacity, antisense oligonucleotide sequences targeting clinically relevant Duchenne muscular dystrophy (DMD) exons were tested. For DMD exon 2 skipping, antisense sequences of GTTTTCTTTTGAACATCTTCTCTTTCATCTA (SEQ ID NO: 62) and ATTCTTACCTTAGAAAATTGTGC (SEQ ID NO: 63) were tested. Longer antisense sequences were also tested, which encompasses both SEQ ID NO: 62 and SEQ ID NO: 63 (CCATTCTTACCTTAGAAAATTGTGCATTTACCCATTTTGTGAATGTTTTCTTTTGAAC ATCTTCTCTTTCATCTA; SEQ ID NO: 64) and covers the entirety of DMD exon 2. For DMD exon 51 skipping, antisense sequences “long1” (GCAGGTACCTCCAACATCAAGGAAGATGGCATTTCTAGTTTGGAG; SEQ ID NO: 65) and “dt” (CCTCTGTGATTTTATAACTTGATTCAAGGAAGATGGCATTTCT; SEQ ID NO: 66) were tested. The antisense oligonucleotide of SEQ ID NO: 66 is notable since it anneals to two non-contiguous sections of DMD exon 51. These antisense sequences were tested with the original hU1 promoter (SEQ ID NO: 13) or a modified U7 promoter (SEQ ID NO: 17) and a termination sequence of SEQ ID NO: 60. This demonstrates that the modified U7 promoter of the present disclosure is compatible with various other RNA elements and an antisense payload intended to physically mask the target RNA site, to provide exon skipping.

### Example 10

### Screening for Promoters and Termination Sequences that Enhance Payload Expression and Target Editing

[0508] This example describes a screen to identify promoters and termination sequences that enhance RNA payload expression and target editing. Promoter and termination sequence constructs are expressed at single copy levels in a HEK293 cell line expressing a non-fluorescent GFP-G67R reporter. The promoter and termination sequence constructs encode a guide RNA payload that facilitates ADAR mediated RNA editing of the GFP-G67R reporter via deamination. The promoter sequence is positioned upstream of the payload sequence, and the termination sequence is positioned downstream of the payload sequence. Deamination of the 67^{th} codon of the reporter facilitated by the guide RNA payload reverts “AGA” to “GGA”, corresponding to an Arg to Gly amino acid change, and recovers GFP fluorescence. Fluorescence is positively correlated with editing of the target adenosine. The promoters and termination sequences are screened with two different guide RNA payloads, including a guide RNA 100 bases in length with the target adenosine (A) positioned across the 75^{th} base from the 5′ end of the guide RNA and comprising a macro-footprint of a 6/6 symmetric internal loop at the −6 position (6 bases upstream of the target A to be edited) and a 6/6 symmetric internal loop at the +30 position (30 bases downstream of the target A to be edited). The RNA payload further had an SmOPT variant sequence and a U7 hairpin sequence downstream of the guide RNA.

[0509] In a first screen, proximal sequence elements (PSEs) and 3′ box sequence elements are screened within the context of a mouse U7 promoter with an OCT-1 transcription factor binding sequence of SEQ ID NO: 28. The PSE sequence (SEQ ID NO: 22) is replaced with a PSE from TABLE 2 (SEQ ID NO: 67-SEQ ID NO: 120). The 3′ box sequence element within the termination sequence is selected from a 3′ box sequence from TABLE 3 (SEQ ID NO: 121-SEQ ID NO: 166). The PSEs and 3′ box sequence elements are screened in combination to identify PSE and 3′ box sequence elements that enhance payload expression and target editing. Five additional random sequences are included in each of the PSE sequence pool and the 3′ box sequence pool as negative controls.

[0510] In a second screen, endogenous promoters containing a distal sequence element (DSE) and a PSE are screened in combination with endogenous termination sequences containing a 3′ box sequence element. The promoters from TABLE 5 (SEQ ID NO: 167-SEQ ID NO: 707) are screened in combination with the termination sequences from TABLE 7 (SEQ ID NO: 708-SEQ ID NO: 1240) to identify promoter and termination sequence pairs that enhance payload expression and target editing. Ten additional random sequences are included in each of the promoter sequence pool and the termination sequence pool as negative controls.

[0511] In a third screen, PSEs and 3′ box sequence elements identified in the first screen as enhancing payload expression and target editing are inserted into the promoters and termination sequences, respectively, identified in the second screen. The PSEs of promoters identified in the second screen are replaced with PSEs identified in the first screen. The 3′ box sequence elements in the termination sequences identified in the second screen are replaced with 3′ box sequence elements identified in the first screen. The resulting engineered promoters and termination sequences are screened in combination to identify sequences that enhance payload expression and target editing.

### Example 11

### In Vivo Targeting of the SNCA 3′UTR for RNA Editing

[0512] This example describes the use of a promoter of the present disclosure to target the 3′UTR of the SNCA gene with two guide RNA for ADAR-mediated RNA editing. An AAV was used to deliver the guide RNA payload. The AAV vector encoding the two guide RNA payloads included an upstream promoter sequence of SEQ ID NO: 1241 driving expression of a first guide RNA, a SmOPT sequence, a U7 hairpin, and a downstream sequence of SEQ ID NO: 60 and also included an upstream promoter sequence of SEQ ID NO: 17 driving expression of a second guide RNA, an SmOPT sequence, a U7 hairpin, and a downstream sequence of SEQ ID NO: 1242. The guide RNAs targeted the 3′UTR of SNCA was administered in mice via intracerebroventricular injection. Up to 75% in vivo RNA editing was observed in mouse brain 4 weeks post-administration, demonstrating that the modified promoters and modified 3′box sequences of the present disclosure are capable of driving expression of guide RNAs that facilitate in vivo RNA editing.

### Example 12

### Modified Promoters and Truncated 3′Box Termination Sequences

[0513] This example describes expression of gRNAs from AAV vector constructs in which a modified 3′box termination sequence was evaluated. Briefly vector plasmids comprising a wild type mU7 promoter or a variant of a wild type mU7 promoter driving expression of a guide RNA against a target RNA (SNCA or PMP22), an SmOPT sequence, a U7 hairpin sequence, and a downstream modified 3′box sequence were engineered and transiently transfected in cells. RNA was isolated 48 hours post transfection and treated with DNase. Guide RNA expression was quantified via ddPCR and normalized to a housekeeping gene (GAPDH). Results are shown in FIG. 19A and FIG. 19B. FIG. 19A shows data for constructs that have a wild type (WT) mU7 promoter variant of SEQ ID NO: 1248 (“mU7-156”) in which 100 bases between the DSE and PSE were deleted. All other constructs evaluated contained the wild type mU7 promoter of SEQ ID NO: 15.

[0514] The left two bars in FIG. 19A and the leftmost bar in of FIG. 19B assessed constructs containing the WT mU7 3′box termination sequence of SEQ ID NO: 1243. Constructs labeled D-25 had a downstream modified 3′box sequence comprising a sequence of SEQ ID NO: 1244, which was a 25-base truncation from the 3′end of the WT mU7 3′box termination sequence of SEQ ID NO: 1243. Constructs labeled D-50 had a downstream modified 3′box sequence comprising a sequence of SEQ ID NO: 1245, which was a 50-base truncation from the 3′end of the WT mU7 3′box termination sequence of SEQ ID NO: 1243. Constructs labeled D-60 had a downstream modified 3′box sequence comprising a sequence of SEQ ID NO: 1246, which was a 60-base truncation from the 3′end of the WT mU7 3′box termination sequence of SEQ ID NO: 1243. Constructs labeled D-100 had a downstream modified 3′box sequence comprising a sequence of SEQ ID NO: 1247, which was a 100-base truncation from the 3′end of the WT mU7 3′box termination sequence of SEQ ID NO: 1243.

[0515] As demonstrated in FIG. 19A and FIG. 19B, truncations of the WT mU7 3′box termination sequence resulted in guide RNA expression. Moreover, constructs comprising truncated WT mU7 3′box termination sequences of SEQ ID NO: 1244-SEQ ID NO: 1246 facilitated similar levels of guide RNA expression. Further, constructs comprising a variant of a wild type mU7 promoter of SEQ ID NO: 1248 in which 100 bases between the DSE and PSE were deleted also drove similar levels of guide RNA expression. Thus, these data demonstrate the modularity of the variant promoters and variant 3′box termination sequences disclosed herein in facilitating guide RNA expression.

### Example 13

### Additional Modified Promoter Sequences

[0516] This example describes expression of gRNAs from AAV vector constructs in which promoters were modified by deletions of bases between the DSE and PSE. Briefly vector plasmids comprising full size and truncations of a wild type mU7 promoters or variants of a wild type mU7 promoter driving expression of a guide RNA against a target RNA (SNCA or PMP22), an SmOPT sequence, a U7 hairpin sequence, and a downstream modified 3′box sequence were engineered and transiently transfected in HEK293 cells. RNA was isolated 48 hours post transfection and treated with DNase. Guide RNA expression was quantified via ddPCR and normalized to a housekeeping gene (GAPDH). Results are shown in FIG. 22A and FIG. 22B. FIG. 22A and FIG. 22B show data for constructs that had a promoter sequence comprising a full-length WT mU7 promoter sequence (SEQ ID NO: 15), a variant of the WT mU7 promoter sequence with a 100 base deletion between the DSE and PSE promoter elements (SEQ ID NO: 1248), an engineered mU7 promoter sequence (SEQ ID NO: 17), or a variant of the engineered mU7 promoter sequence with a 100 base deletion between the DSE and PSE promoter elements (SEQ ID NO: 1249). As shown in FIG. 22A, the construct with the engineered mU7 promoter sequence (SEQ ID NO: 17) had the highest expression of the SNCA guide RNA. As shown in FIG. 22B, the constructs with the engineered mU7 promoter sequence (SEQ ID NO: 17) and the modified engineered mU7 promoter sequence with a 100 base deletion between the DSE and PSE promoter elements (SEQ ID NO: 1249) had the highest expression of the PMP22 guide RNA.

### Example 14

### RNA Editing of Modified Promoter Sequences

[0517] This example describes gRNA editing from AAV vector constructs in which promoters were modified by deletions of bases between the DSE and PSE. Briefly vector plasmids comprising full size and truncations of a wild type mU7 promoters driving expression of a Rab7a editing guide RNA against a target RNA (Rab7a), an SmOPT sequence, a U7 hairpin sequence, and a downstream modified 3′box sequence were engineered and transiently transfected in HEK293 cells. RNA was isolated 48 hours post transfection and treated with DNase. The isolated RNA was then converted into cDNA and the Rab7a editing was quantified (“% Editing” in FIG. 23). Results are shown in FIG. 23. FIG. 23 shows data for constructs that had a promoter sequence comprising a full-length WT mU7 promoter sequence (SEQ ID NO: 15), a variant of the WT mU7 promoter sequence with a 50 base deletion between the DSE and PSE promoter elements (SEQ ID NO: 1258), a variant of the WT mU7 promoter sequence with a 75 base deletion between the DSE and PSE promoter elements (SEQ ID NO: 1259), a variant of the WT mU7 promoter sequence with a 100 base deletion between the DSE and PSE promoter elements (SEQ ID NO: 1248), a variant of the WT mU7 promoter sequence with a 126 base deletion between the DSE and PSE promoter elements (SEQ ID NO: 1260), and a variant of the WT mU7 promoter sequence with a 135 base deletion between the DSE and PSE promoter elements (SEQ ID NO: 1261). As seen in FIG. 23, the percent editing of Rab7a was highest with a variant of the WT mU7 promoter sequence with a 100 base deletion between the DSE and PSE promoter elements (SEQ ID NO: 1248).

### Example 15

### Expression of Engineered Guide RNAs

[0518] This example describes further evaluation of expression of engineered guide RNAs with the engineered promoter elements described herein (see EXAMPLE 6) and provided in TABLE 15. Constructs expressing either a PMP22-targeting engineered guide RNA (“Reporter 1” in FIG. 20A, FIG. 21A, FIG. 21B, and FIG. 22A) or an SNCA-targeting engineered guide RNA (“Reporter 2” in FIG. 20B, FIG. 21A, FIG. 21B, and FIG. 22A) were screened using the luciferase assay described in EXAMPLE 1. Expression of the SNCA-targeting guide RNA and the PMP22-targeting guide RNA were also tested under control of a wildtype human U1 promoter (SEQ ID NO: 13), a wildtype mouse U7 promoter (SEQ ID NO: 15), and an engineered human U1 promoter (SEQ ID NO: 1241). A construct encoding only a GFP cassette (“GFP ctrl”) was used as a negative control.

[0519] As shown in FIG. 20A, the PMP22-targeting engineered guide RNA constructs with the engineered promoter elements included in SEQ ID NO: 2, SEQ ID NO: 3, and SEQ ID NO: 5 had increased fold expression relative to the control mU7 wildtype guide RNA construct (SEQ ID NO: 1). As shown in FIG. 20B, the SNCA-targeting engineered guide RNA constructs with the engineered promoter elements included in SEQ ID NO: 9, SEQ ID NO: 10, and SEQ ID NO: 12 had increased fold expression relative to the control mU7 wildtype guide RNA construct (SEQ ID NO: 6).

[0520] The transcription site modifications were then overlaid to additional small nucleotide RNA (snRNA) promoters including the wildtype mU7 promoter (mU7, SEQ ID NO: 15) and the wildtype human U1 promoter (hU1, SEQ ID NO: 13) and tested in HEK293T cells. As shown on the left panel of FIG. 21A, in HEK293T cells, PMP22-targeting engineered guide RNA constructs with the engineered promoter elements included in SEQ ID NO: 5 had increased fold expression relative to the control mU7 wildtype guide RNA construct (SEQ ID NO: 1), as well as increased expression when compared to a control PMP22-targeting guide RNA under the control of a wildtype human U1 promoter (SEQ ID NO: 13). Similarly, as shown on the right panel of FIG. 21A, in HEK293T cells, the SNCA-targeting engineered guide RNA constructs with the engineered promoter elements included in SEQ ID NO: 12 had increased fold expression relative to the control mU7 wildtype guide RNA construct (SEQ ID NO: 6).

[0521] The wildtype human U1 promoter (SEQ ID NO: 13) was also used for transcription sites modifications to create an engineered human U1 promoter (SEQ ID NO: 1241). As shown in the left panel of FIG. 21B, in HEK293T cells, the engineered PMP22-targeting guide RNA under the control of the engineered hU1 promoter (SEQ ID NO: 1241) had greater fold expression relative to a control PMP22-targeting guide RNA under the control of the wildtype human U1 promoter (SEQ ID NO: 13). As shown on the right panel of FIG. 21B, in HEK293T cells, the engineered SNCA-targeting guide RNA under the control of the engineered hU1 promoter (SEQ ID NO: 1241) had greater fold expression relative to the control hU1 wildtype guide RNA construct (SEQ ID NO: 7). Therefore, as shown in FIG. 21A and FIG. 21B, the regulatory site changes of the present disclosure can be used to enhance the performance of standard mouse U7 and human U1 promoters, as measured by boosted gRNA expression in both cases. These results demonstrate that the regulatory site modifications disclosed herein have the ability to be used across type II snRNA promoters (e.g., U7 and U1).

[0522] Expanding from HEK293T cells, the transcription site modifications to the wildtype mU7 promoter (mU7, SEQ ID NO: 15) were also tested in ARPE-19 cells and HepG2 cells, as shown in FIG. 17A and FIG. 17B, respectively.

### Example 16

### Treatment of Parkinson's Disease using a LRRK2-Targeting Engineered Guide RNA Expression Construct

[0523] This example describes treatment of Parkinson's disease in a subject using a LRRK2-targeting engineered guide RNA expression construct. The subject has a mutation in LRRK2 associated with Parkinson's disease (e.g., a G to A mutation that results in a G2019S amino acid substitution). An engineered guide RNA expression construct encoding an engineered guide RNA that hybridizes to LRRK2, optionally operatively linked to smOPT, and under transcriptional control of an engineered promoter comprising one or more sequence variant of SEQ ID NO: 24-SEQ ID NO: 37 or SEQ ID NO: 67-SEQ ID NO: 120, a promoter of any of SEQ ID NO: 13-SEQ ID NO: 17, SEQ ID NO: 167-SEQ ID NO: 707, SEQ ID NO: 1241, SEQ ID NO: 1248-SEQ ID NO: 1253, or SEQ ID NO: 1259-SEQ ID NO: 1263, an engineered termination sequence comprising one or more sequence variant of SEQ ID NO: 38-SEQ ID NO: 42 or SEQ ID NO: 121-SEQ ID NO: 166, a termination sequence of any of SEQ ID NO: 60, SEQ ID NO: 708-SEQ ID NO: 1240, SEQ ID NO: 1242, SEQ ID NO: 1243-SEQ ID NO: 1247, SEQ ID NO: 1254-SEQ ID NO: 1257, SEQ ID NO: 1264-SEQ ID NO: 1272, SEQ ID NO: 1275, or SEQ ID NO: 1287-SEQ ID NO: 1289, or a combination thereof, is delivered to a cell of the subject. Optionally, the RNA expression cassette comprises an OCT-1 transcription factor binding sequence of SEQ ID NO: 28, a proximal sequence element of SEQ ID NO: 31, and a transcription termination sequence of SEQ ID NO: 41. The engineered guide RNA, upon hybridization to the target RNA and formation of the guide-target RNA scaffold, forms a micro-footprint, macro-footprint, or both. The LRRK2-targeting guide RNA, optionally operatively linked to smOPT, is expressed in a cell of the subject having a mutant LRRK2. The expressed engineered guide RNA hybridizes to the mutant LRRK2 RNA in the cell and recruits ADAR editing enzyme to the mutant LRRK2 RNA. The ADAR enzyme edits the mutant LRRK2 RNA and corrects the mutation in the LRRK2 RNA associated with Parkinson's disease, thereby treating the Parkinson's disease.

### Example 17

### Treatment of Facioscapulohumeral Muscular Dystrophy using a DUX4-Targeting Engineered Guide RNA Expression Construct

[0524] This example describes treatment of facioscapulohumeral muscular dystrophy (FSHD) in a subject using a DUX4-targeting engineered guide RNA expression construct. An engineered guide RNA is designed to target a region of DUX4 RNA (e.g., the polyA tail) that, when edited by ADAR, would result in RNA and protein knockdown. An engineered guide RNA expression construct encoding the engineered guide RNA that hybridizes to DUX4, optionally operatively linked to smOPT, and under transcriptional control of an engineered promoter comprising one or more sequence variant of SEQ ID NO: 24-SEQ ID NO: 37 or SEQ ID NO: 67-SEQ ID NO: 120, a promoter of any of SEQ ID NO: 13-SEQ ID NO: 17, SEQ ID NO: 167-SEQ ID NO: 707, SEQ ID NO: 1241, SEQ ID NO: 1248-SEQ ID NO: 1253, or SEQ ID NO: 1259-SEQ ID NO: 1263, a engineered termination sequence comprising one or more sequence variant of SEQ ID NO: 38-SEQ ID NO: 42 or SEQ ID NO: 121-SEQ ID NO: 166, a termination sequence of any of SEQ ID NO: 60, SEQ ID NO: 708-SEQ ID NO: 1240, SEQ ID NO: 1242, SEQ ID NO: 1243-SEQ ID NO: 1247, SEQ ID NO: 1254-SEQ ID NO: 1257, SEQ ID NO: 1264-SEQ ID NO: 1272, SEQ ID NO: 1275, or SEQ ID NO: 1287-SEQ ID NO: 1289, or a combination thereof, is delivered to a cell of the subject. Optionally, the RNA expression cassette comprises an OCT-1 transcription factor binding sequence of SEQ ID NO: 28, a proximal sequence element of SEQ ID NO: 31, and a transcription termination sequence of SEQ ID NO: 41. The engineered guide RNA, upon hybridization to the target RNA and formation of the guide-target RNA scaffold, forms a micro-footprint, macro-footprint, or both. The DUX4-targeting guide RNA, optionally operatively linked to smOPT, is expressed in a cell of the subject having a mutant DUX4. The expressed engineered guide RNA hybridizes to the DUX4 RNA in the cell and recruits ADAR editing enzyme to the DUX4 RNA. The ADAR enzyme edits the DUX4 RNA and knocks down DUX4 RNA and protein expression associated with FSHD, thereby treating the FSHD.

### Example 18

### Treatment of a Synucleinopathy using a SNCA-Targeting Engineered Guide RNA Expression Construct

[0525] This example describes treatment of a synucleinopathy, such as Parkinson's disease or Lewy body dementia, in a subject using a SNCA-targeting engineered guide RNA expression construct. An engineered guide RNA is designed to target a region of SNCA RNA (e.g., the TIS) that, when edited by ADAR, would result in RNA and protein knockdown. An engineered guide RNA expression construct encoding an engineered guide RNA that hybridizes to SNCA, optionally operatively linked to smOPT, and under transcriptional control of an engineered promoter comprising one or more sequence variant of SEQ ID NO: 24-SEQ ID NO: 37 or SEQ ID NO: 67-SEQ ID NO: 120, a promoter of any of SEQ ID NO: 13-SEQ ID NO: 17, SEQ ID NO: 167-SEQ ID NO: 707, SEQ ID NO: 1241, SEQ ID NO: 1248-SEQ ID NO: 1253, or SEQ ID NO: 1259-SEQ ID NO: 1263, a engineered termination sequence comprising one or more sequence variant of SEQ ID NO: 38-SEQ ID NO: 42 or SEQ ID NO: 121-SEQ ID NO: 166, a termination sequence of any of SEQ ID NO: 60, SEQ ID NO: 708-SEQ ID NO: 1240, SEQ ID NO: 1242, SEQ ID NO: 1243-SEQ ID NO: 1247, SEQ ID NO: 1254-SEQ ID NO: 1257, SEQ ID NO: 1264-SEQ ID NO: 1272, SEQ ID NO: 1275, or SEQ ID NO: 1287-SEQ ID NO: 1289, or a combination thereof, is delivered to a cell of the subject. Optionally, the RNA expression cassette comprises an OCT-1 transcription factor binding sequence of SEQ ID NO: 28, a proximal sequence element of SEQ ID NO: 31, and a transcription termination sequence of SEQ ID NO: 41. The engineered guide RNA, upon hybridization to the target RNA and formation of the guide-target RNA scaffold, forms a micro-footprint, macro-footprint, or both. The SNCA-targeting guide RNA, optionally operatively linked to smOPT, is expressed in a cell of the subject having a mutant SNCA. The expressed engineered guide RNA hybridizes to the SNCA RNA in the cell and recruits ADAR editing enzyme to the SNCA RNA. The ADAR enzyme edits the SNCA RNA and knocks down SNCA RNA and protein expression associated with the synucleinopathy, thereby treating the synucleinopathy.

### Example 19

### Treatment of Frontotemporal Dementia using a GRN-Targeting Engineered Guide RNA Expression Construct

[0526] This example describes treatment of frontotemporal dementia in a subject using a GRN-targeting engineered guide RNA expression construct. An engineered guide RNA expression construct encoding an engineered guide RNA that hybridizes to GRN, optionally operatively linked to smOPT, and under transcriptional control of an engineered promoter comprising one or more sequence variant of SEQ ID NO: 24-SEQ ID NO: 37 or SEQ ID NO: 67-SEQ ID NO: 120, a promoter of any of SEQ ID NO: 13-SEQ ID NO: 17, SEQ ID NO: 167-SEQ ID NO: 707, SEQ ID NO: 1241, SEQ ID NO: 1248-SEQ ID NO: 1253, or SEQ ID NO: 1259-SEQ ID NO: 1263, a engineered termination sequence comprising one or more sequence variant of SEQ ID NO: 38-SEQ ID NO: 42 or SEQ ID NO: 121-SEQ ID NO: 166, a termination sequence of any of SEQ ID NO: 60, SEQ ID NO: 708-SEQ ID NO: 1240, SEQ ID NO: 1242, SEQ ID NO: 1243-SEQ ID NO: 1247, SEQ ID NO: 1254-SEQ ID NO: 1257, SEQ ID NO: 1264-SEQ ID NO: 1272, SEQ ID NO: 1275, or SEQ ID NO: 1287-SEQ ID NO: 1289, or a combination thereof, is delivered to a cell of the subject. Optionally, the RNA expression cassette comprises an OCT-1 transcription factor binding sequence of SEQ ID NO: 28, a proximal sequence element of SEQ ID NO: 31, and a transcription termination sequence of SEQ ID NO: 41. The engineered guide RNA, upon hybridization to the target RNA and formation of the guide-target RNA scaffold, forms a micro-footprint, macro-footprint, or both. The GRN-targeting guide RNA, optionally operatively linked to smOPT, is expressed in a cell of the subject having a mutant GRN. The expressed engineered guide RNA hybridizes to target GRN RNA in the cell and recruits ADAR editing enzyme. The ADAR enzyme edits a target A of the target GRN RNA, increasing GRN protein expression, thereby treating the frontotemporal dementia.

### Example 20

### Treatment of a Tauopathy using a MAPT-Targeting Engineered Guide RNA Expression Construct

[0527] This example describes treatment of a tauopathy, such as Alzheimer's disease frontotemporal dementia, Parkinson's disease, progressive supranuclear palsy, corticobasal degeneration, or chronic traumatic encephalopathy, in a subject using a MAPT-targeting engineered guide RNA expression construct. An engineered guide RNA is designed to target a region of MAPT RNA (e.g., the TIS) that, when edited by ADAR, would result in RNA and protein knockdown. An engineered guide RNA expression construct encoding an engineered guide RNA that hybridizes to MAPT, optionally operatively linked to smOPT, and under transcriptional control of an engineered promoter comprising one or more sequence variant of SEQ ID NO: 24-SEQ ID NO: 37 or SEQ ID NO: 67-SEQ ID NO: 120, a promoter of any of SEQ ID NO: 13-SEQ ID NO: 17, SEQ ID NO: 167-SEQ ID NO: 707, SEQ ID NO: 1241, SEQ ID NO: 1248-SEQ ID NO: 1253, or SEQ ID NO: 1259-SEQ ID NO: 1263, a engineered termination sequence comprising one or more sequence variant of SEQ ID NO: 38-SEQ ID NO: 42 or SEQ ID NO: 121-SEQ ID NO: 166, a termination sequence of any of SEQ ID NO: 60, SEQ ID NO: 708-SEQ ID NO: 1240, SEQ ID NO: 1242, SEQ ID NO: 1243-SEQ ID NO: 1247, SEQ ID NO: 1254-SEQ ID NO: 1257, SEQ ID NO: 1264-SEQ ID NO: 1272, SEQ ID NO: 1275, or SEQ ID NO: 1287-SEQ ID NO: 1289, or a combination thereof, is delivered to a cell of the subject. Optionally, the RNA expression cassette comprises an OCT-1 transcription factor binding sequence of SEQ ID NO: 28, a proximal sequence element of SEQ ID NO: 31, and a transcription termination sequence of SEQ ID NO: 41. The engineered guide RNA, upon hybridization to the target RNA and formation of the guide-target RNA scaffold, forms a micro-footprint, macro-footprint, or both. The MAPT-targeting guide RNA, optionally operatively linked to smOPT, is expressed in a cell of the subject having a mutant MAPT. The expressed engineered guide RNA hybridizes to the target MAPT RNA in the cell and recruits ADAR editing enzyme. The ADAR enzyme edits a target A of the MAPT RNA, thereby treating the tauopathy.

### Example 21

### Treatment of Alpha-1 Antitrypsin Deficiency using a SERPINA1-Targeting Engineered Guide RNA Expression Construct

[0528] This example describes treatment of alpha-1 antitrypsin deficiency in a subject using a SERPINA1-targeting engineered guide RNA expression construct. The subject has a mutation in SERPINA1 associated with alpha-1 antitrypsin deficiency (e.g., a G to A mutation that results in an E342K amino acid substitution). An engineered guide RNA expression construct encoding an engineered guide RNA that hybridizes to SERPINA1, optionally operatively linked to smOPT, and under transcriptional control of an engineered promoter comprising one or more sequence variant of SEQ ID NO: 24-SEQ ID NO: 37 or SEQ ID NO: 67-SEQ ID NO: 120, a promoter of any of SEQ ID NO: 13-SEQ ID NO: 17, SEQ ID NO: 167-SEQ ID NO: 707, SEQ ID NO: 1241, SEQ ID NO: 1248-SEQ ID NO: 1253, or SEQ ID NO: 1259-SEQ ID NO: 1263, a engineered termination sequence comprising one or more sequence variant of SEQ ID NO: 38-SEQ ID NO: 42 or SEQ ID NO: 121-SEQ ID NO: 166, a termination sequence of any of SEQ ID NO: 60, SEQ ID NO: 708-SEQ ID NO: 1240, SEQ ID NO: 1242, SEQ ID NO: 1243-SEQ ID NO: 1247, SEQ ID NO: 1254-SEQ ID NO: 1257, SEQ ID NO: 1264-SEQ ID NO: 1272, SEQ ID NO: 1275, or SEQ ID NO: 1287-SEQ ID NO: 1289, or a combination thereof, is delivered to a cell of the subject. Optionally, the RNA expression cassette comprises an OCT-1 transcription factor binding sequence of SEQ ID NO: 28, a proximal sequence element of SEQ ID NO: 31, and a transcription termination sequence of SEQ ID NO: 41. The engineered guide RNA contains a base mismatch relative to the mutant SERPINA1 sequence such that a bulge or mismatch forms upon hybridization of the engineered guide RNA to a mutant SERPINA1 RNA. The SERPINA1-targeting guide RNA, optionally operatively linked to smOPT, is expressed in a cell of the subject having a mutant SERPINA1. The expressed engineered guide RNA hybridizes to the mutant SERPINA1 RNA in the cell and recruits ADAR editing enzyme to the mutant SERPINA1 RNA. The ADAR enzyme edits the mutant SERPINA1 RNA and corrects the mutation in the SERPINA1 RNA associated with alpha-1 antitrypsin deficiency, thereby treating the alpha-1 antitrypsin deficiency.

### Example 22

### Treatment of Alzheimer's Disease using an APP-Targeting Engineered Guide RNA Expression Construct

[0529] This example describes treatment of Alzheimer's disease in a subject using an APP-targeting engineered guide RNA expression construct. An engineered guide RNA is designed to target a secretase enzyme cleavage site in APP that, when edited by ADAR, would result in reduced levels of AB 40/AB 42 cleavage fragments associated with Alzheimer's disease. An engineered guide RNA expression construct encoding an engineered guide RNA that hybridizes to APP, optionally operatively linked to smOPT, and under transcriptional control of an engineered promoter comprising one or more sequence variant of SEQ ID NO: 24-SEQ ID NO: 37 or SEQ ID NO: 67-SEQ ID NO: 120, a promoter of any of SEQ ID NO: 13-SEQ ID NO: 17, SEQ ID NO: 167-SEQ ID NO: 707, SEQ ID NO: 1241, SEQ ID NO: 1248-SEQ ID NO: 1253, or SEQ ID NO: 1259-SEQ ID NO: 1263, a engineered termination sequence comprising one or more sequence variant of SEQ ID NO: 38-SEQ ID NO: 42 or SEQ ID NO: 121-SEQ ID NO: 166, a termination sequence of any of SEQ ID NO: 60, SEQ ID NO: 708-SEQ ID NO: 1240, SEQ ID NO: 1242, SEQ ID NO: 1243-SEQ ID NO: 1247, SEQ ID NO: 1254-SEQ ID NO: 1257, SEQ ID NO: 1264-SEQ ID NO: 1272, SEQ ID NO: 1275, or SEQ ID NO: 1287-SEQ ID NO: 1289, or a combination thereof, is delivered to a cell of the subject. Optionally, the RNA expression cassette comprises an OCT-1 transcription factor binding sequence of SEQ ID NO: 28, a proximal sequence element of SEQ ID NO: 31, and a transcription termination sequence of SEQ ID NO: 41. The engineered guide RNA contains a base mismatch relative to the mutant APP sequence such that a bulge or mismatch forms upon hybridization of the engineered guide RNA to a mutant APP RNA. The APP-targeting guide RNA, optionally operatively linked to smOPT, is expressed in a cell of the subject having a mutant APP. The expressed engineered guide RNA hybridizes to the target APP RNA in the cell and recruits ADAR editing enzyme. The ADAR enzyme edits a target A of the APP RNA, reducing formation of plaque-forming fragments (e.g., AB 40 or AB 42), thereby treating the Alzheimer's disease.

### Example 23

### Treatment of Stargardt Disease using an ABCA4-Targeting Engineered Guide RNA Expression Construct

[0530] This example describes treatment of Stargardt disease in a subject using an ABCA4-targeting engineered guide RNA expression construct. The subject has a mutation in ABCA4 associated with Stargardt disease (e.g., G1961E). An engineered guide RNA expression construct encoding an engineered guide RNA that hybridizes to ABCA4, optionally operatively linked to smOPT, and under transcriptional control of an engineered promoter comprising one or more sequence variant of SEQ ID NO: 24-SEQ ID NO: 37 or SEQ ID NO: 67-SEQ ID NO: 120, a promoter of any of SEQ ID NO: 13-SEQ ID NO: 17, SEQ ID NO: 167-SEQ ID NO: 707, SEQ ID NO: 1241, SEQ ID NO: 1248-SEQ ID NO: 1253, or SEQ ID NO: 1259-SEQ ID NO: 1263, a engineered termination sequence comprising one or more sequence variant of SEQ ID NO: 38-SEQ ID NO: 42 or SEQ ID NO: 121-SEQ ID NO: 166, a termination sequence of any of SEQ ID NO: 60, SEQ ID NO: 708-SEQ ID NO: 1240, SEQ ID NO: 1242, SEQ ID NO: 1243-SEQ ID NO: 1247, SEQ ID NO: 1254-SEQ ID NO: 1257, SEQ ID NO: 1264-SEQ ID NO: 1272, SEQ ID NO: 1275, or SEQ ID NO: 1287-SEQ ID NO: 1289, or a combination thereof, is delivered to a cell of the subject. Optionally, the RNA expression cassette comprises an OCT-1 transcription factor binding sequence of SEQ ID NO: 28, a proximal sequence element of SEQ ID NO: 31, and a transcription termination sequence of SEQ ID NO: 41. The engineered guide RNA contains a base mismatch relative to the mutant ABCA4 sequence such that a bulge or mismatch forms upon hybridization of the engineered guide RNA to a mutant ABCA4 RNA. The ABCA4-targeting guide RNA, optionally operatively linked to smOPT, is expressed in a cell of the subject having a mutant ABCA4. The expressed engineered guide RNA hybridizes to the mutant ABCA4 RNA in the cell and recruits ADAR editing enzyme to the mutant ABCA4 RNA. The ADAR enzyme edits the mutant ABCA4 RNA and corrects the mutation in the ABCA4 RNA associated with Stargardt disease, thereby treating the Stargardt disease.

### Example 24

### Screening of HSUR Termination Sequences

[0531] This example describes screening of Herpesvirus saimiri U-RNA elements (HSUR). The HSUR elements were extracted from NCBI NC_001350 and incorporated downstream of a gRNA cassette with a RNU5B1 promoter (SEQ ID NO: 1250) and a GFP gRNA which targets a GFP-G67R reporter wherein deamination of an AGA codon to GGA restores fluorescence in a correlative fashion. The HSUR elements are provided in TABLE 16.

TABLE 16
HSUR Elements

| Termi- | | |
|---|---|---|
| nator | SEQ ID | |
| Origin | NO: | Sequence |
| HSUR1 | SEQ ID | TCTAAGTAAGTTAAAAGTAGACTTTGGGTATTT |
| | NO: 1266 | ACCGAGATCTCTGCAAACACAGAACTTCTGTTC |
| | | TCAAGTGTATCATTTTATATCACTAGCTGTTAA |
| | | A |
| HSUR2 | SEQ ID | CCTTAAGTTTAAAAAAAGGTATCTGTGCTCTCA |
| | NO: 1267 | AGGCTTTAAACTTTGTGTTTAAAAGTTTTAGAG |
| | | CCTTGAGAGCACTTCTCTAAAACTAAAAATTGT |
| | | T |
| HSUR3 | SEQ ID | CCTTTAGAAGTTAAAAAACAGACGTTAAAACTT |
| | NO: 1268 | GTAAATTCTAGTATCAGTAGCTTTAAAACACAA |
| | | ACAAAAAATACACTAGAAAAATACAGCAAGATT |
| | | A |
| HSUR4 | SEQ ID | CTTAGTAAGTTTAAAAACAGAAAAAAAACCGTG |
| | NO: 1269 | TTGCTACAGCTATAAACTTCAAACATGCAGTTT |
| | | ATAGCAGTGGGCAACACGTCTCATCTCAAAAAT |
| | | T |
| HSUR5 | SEQ ID | CCTAAGTCAGTACAAAAACAGAAAGTCCGCGCT |
| | NO: 1270 | CTTACTGCTTGATACTTCAACAAGAAGTTACAG |
| | | CAGTGAGAGCGCTGCTACATTATTTAGAACTTC |
| | | C |
| HSUR6 | SEQ ID | CTGTTACTAGTTTAAAAACAGAAGTTGCTACTC |
| | NO: 1271 | GTTAAAAAGTACTAAACAAACAAGCTTTTTAAA |
| | | ACTTAGCTTTAAAAAATCAACAATAATTTTGAA |
| | | C |
| HSUR7 | SEQ ID | CTTCCGTAAGTAAAAAACAGAACTGTGCTTTAA |
| | NO: 1272 | ACTGTTTTTAACAGAAACGCCTTGCGTCAAAAT |
| | | GAAAGTTCTTAAGTAAAAGCGCTCGTATCAAAA |
| | | T |

[0532] The cassettes were introduced as single copy by BxbI integrase and enriched by puromycin for 14 days. The GFP expression was quantified by the geometric mean of fluorescence intensity (GFP gMFI) by flow cytometry and cells were gated for mCherry fluorescence upstream to enable graphing only of the cells which were positive for the cassette. As shown in FIG. 24, three termination sequences displayed a higher GFP gMFI compared to the RNU5B1 termination sequence (SEQ ID NO: 1254) with HSUR4 (SEQ ID NO: 1269) being the highest and a potential reference point for future studies.

### Example 24

### Screening of Select Promoter Sequence and Termination Sequence Combinations

[0533] This example describes screening of select combinations of promoters and termination sequences. Briefly a subset of promoter sequences (TABLE 5) and termination sequences (TABLE 7) native to the human genome which followed canonical motif placement were experimentally tested in a single copy fashion against two target mRNAs. The promoter-termination sequence cassettes in question were paired with the endogenous counterparts. The promoter-termination sequence cassettes were compared against the promoter-termination sequence pair of a wildtype (WT) mU7 expression cassette with a promoter sequence of SEQ ID NO: 15 and a termination sequence of SEQ ID NO: 1243, and an engineered mU7 expression cassette with a promoter sequence of SEQ ID NO: 17 and a termination sequence of SEQ ID NO: 60. One of the targets was a GFP-G67R reporter wherein deamination of an AGA codon to GGA restores fluorescence in a correlative fashion. The other target was a model adenosine within the SNCA 3′ UTR. The gRNA expression was assessed by ddPCR. FIG. 25A shows the expression of the GFP-G67R gRNA expression cassette with a promoter sequence of SEQ ID NO: 17 and a termination sequence of SEQ ID NO: 60 (SEQ ID NO: 17/SEQ ID NO: 60), a promoter sequence of SEQ ID NO: 15 and a termination sequence of SEQ ID NO: 1243 (SEQ ID NO: 15/SEQ ID NO: 1243), a promoter sequence of SEQ ID NO: 1250 and a termination sequence of SEQ ID NO: 1254 (SEQ ID NO: 1250/SEQ ID NO: 1254), a promoter sequence of SEQ ID NO: 1252 and a termination sequence of SEQ ID NO: 1256 (SEQ ID NO: 1252/SEQ ID NO: 1256), a promoter sequence of SEQ ID NO: 1251 and a termination sequence of SEQ ID NO: 1255 (SEQ ID NO: 1251/SEQ ID NO: 1255), or a promoter sequence of SEQ ID NO: 1253 and a termination sequence of SEQ ID NO: 1257 (SEQ ID NO: 1253/SEQ ID NO: 1257). FIG. 25B shows the expression of the SNCA gRNA expression cassette with a promoter sequence of SEQ ID NO: 17 and a termination sequence of SEQ ID NO: 60 (SEQ ID NO: 17/SEQ ID NO: 60), a promoter sequence of SEQ ID NO: 15 and a termination sequence of SEQ ID NO: 1243 (SEQ ID NO: 15/SEQ ID NO: 1243), a promoter sequence of SEQ ID NO: 1250 and a termination sequence of SEQ ID NO: 1254 (SEQ ID NO: 1250/SEQ ID NO: 1254), a promoter sequence of SEQ ID NO: 1252 and a termination sequence of SEQ ID NO: 1256 (SEQ ID NO: 1252/SEQ ID NO: 1256), a promoter sequence of SEQ ID NO: 1251 and a termination sequence of SEQ ID NO: 1255 (SEQ ID NO: 1251/SEQ ID NO: 1255), or a promoter sequence of SEQ ID NO: 1253 and a termination sequence of SEQ ID NO: 1257 (SEQ ID NO: 1253/SEQ ID NO: 1257). As shown in FIG. 25A and FIG. 25B, the increased expression of both the GFP-G67R gRNA and the SNCA gRNA was seen in the expression cassettes with a promoter sequence of SEQ ID NO: 17 and a termination sequence of SEQ ID NO: 60 (SEQ ID NO: 17/SEQ ID NO: 60), a promoter sequence of SEQ ID NO: 1250 and a termination sequence of SEQ ID NO: 1254 (SEQ ID NO: 1250/SEQ ID NO: 1254), a promoter sequence of SEQ ID NO: 1252 and a termination sequence of SEQ ID NO: 1256 (SEQ ID NO: 1252/SEQ ID NO: 1256), a promoter sequence of SEQ ID NO: 1251 and a termination sequence of SEQ ID NO: 1255 (SEQ ID NO: 1251/SEQ ID NO: 1255), and a promoter sequence of SEQ ID NO: 1253 and a termination sequence of SEQ ID NO: 1257 (SEQ ID NO: 1253/SEQ ID NO: 1257) when compared to the WT mU7 expression cassette construct with a promoter sequence of SEQ ID NO: 15 and a termination sequence of SEQ ID NO: 1243 (SEQ ID NO: 15/SEQ ID NO: 1243). The top performing pairings were moved forward for individual sequence assessment as well as a reference point for future experiments.

### Example 25

### Pooled Screening of Termination Sequences by FlowSeq Screen

[0534] This example describes a flow-seq pipeline for screening of termination sequences. Briefly, as shown in FIG. 26, a library of 540 termination sequences were screened in a GFP-G67R Flowseq screen with a GFP gRNA. The library comprised putative termination sequences extracted from genomic sequences primarily downstream of human U1, U2, U4, U5, and U7 sequences which were cloned in triplicate downstream of three promoters with a GFP gRNA. The three promoters were SEQ ID NO:1250, SEQ ID NO: 17, and SEQ ID NO: 1251. The GFP gRNA targets a GFP-G67R reporter wherein deamination of an AGA codon to GGA restores fluorescence in a correlative fashion. The cassettes were introduced as single copy in a HEK293 reporter cell line by BxbI integrase and were enriched by puromycin until at least 90% of cells were positive as indicated by mCherry fluorescence. The GFP expression was quantified by the geometric mean of fluorescence intensity (GFP gMFI) by flow cytometry and cells were gated for mCherry fluorescence upstream to enable graphing only of the cells which were positive for the cassette. Once enriched, the cells were sorted into bins of fluorescence by a SONY SH800S cell sorter. The cells were sorted into two bins, the top 10% of cells and the bottom 10% of cells determined by GFP gMFI. Post sorting, the cells were confirmed to have a correspondingly increased or decreased gMFI signal. Genomic DNA from each bin, as well as the unsorted population was isolated and sequenced. A linear model was developed based the relative abundance for a given termination sequence between these bins. FIG. 27 shows results from the flowseq analysis, with the points representing the normalized performance of each termination sequence pooled from each of three promoter sequences. The circled data points indicate superior termination sequences that were advanced into a single copy assessment including SEQ ID NO: 1254 and SEQ ID NO: 1255 that showed similar expression compared to a WT mU7 termination sequence (SEQ ID NO: 1243). FIG. 28 shows the results of single copy assessment of each termination sequence. As seen in FIG. 28, expression cassettes with termination sequences of SEQ ID NO: 712, SEQ ID NO: 868, SEQ ID NO: 1021, SEQ ID NO: 930, SEQ ID NO: 1017, SEQ ID NO: 1254, SEQ ID NO: 906, SEQ ID NO: 1007, and SEQ ID NO: 1002 all had similar or greater expression as compared to the engineered mU7 termination sequence of SEQ ID NO: 60.

[0535] While preferred embodiments of the present invention have been shown and described herein, it will be apparent to those skilled in the art that such embodiments are provided by way of example only. Numerous variations, changes, and substitutions will now occur to those skilled in the art without departing from the invention. It should be understood that various alternatives to the embodiments of the invention described herein may be employed in practicing the invention. It is intended that the following claims define the scope of the invention and that methods and structures within the scope of these claims and their equivalents be covered thereby.

What is claimed is:

1. An expression cassette comprising:
a promoter sequence comprising a sequence having at least 80% sequence identity to any one of:
a) SEQ ID NO: 17, SEQ ID NO: 1250, or SEQ ID NO: 1262;
b) SEQ ID NO: 13 or SEQ ID NO: 15; or
c) SEQ ID NO: 1241, SEQ ID NO: 1251, SEQ ID NO: 1252, SEQ ID NO: 1253, or SEQ ID NO: 1263;
a payload sequence under transcriptional control of the promoter sequence, the payload sequence comprising a small RNA payload; and
a termination sequence comprising a sequence having at least 80% identity to any one of:
a) SEQ ID NO: 1002, SEQ ID NO: 1017, SEQ ID NO: 1264, or SEQ ID NO: 1265; or
b) SEQ ID NO: 60, SEQ ID NO: 771, SEQ ID NO: 930, SEQ ID NO: 1007, SEQ ID NO: 1021, SEQ ID NO: 1242, SEQ ID NO: 1254, SEQ ID NO: 1255, SEQ ID NO: 1257, or SEQ ID NO: 1269.

2. An expression cassette comprising:
a promoter sequence comprising a sequence having at least 80% sequence identity to any one of:
a) SEQ ID NO: 17, SEQ ID NO: 1250, or SEQ ID NO: 1262;
b) SEQ ID NO: 13 or SEQ ID NO: 15; or
c) SEQ ID NO: 1241, SEQ ID NO: 1251, SEQ ID NO: 1252, SEQ ID NO: 1253, or SEQ ID NO: 1263;
a payload sequence under transcriptional control of the promoter sequence, the payload sequence comprising a small RNA payload; and
a termination sequence.

3. An expression cassette comprising:
a promoter sequence;
a payload sequence under transcriptional control of the promoter sequence, the payload sequence comprising a small RNA payload; and
a termination sequence comprising a sequence having at least 80% identity to any one of:
a) SEQ ID NO: 1002, SEQ ID NO: 1017, SEQ ID NO: 1264, or SEQ ID NO: 1265; or
b) SEQ ID NO: 60, SEQ ID NO: 771, SEQ ID NO: 930, SEQ ID NO: 1007, SEQ ID NO: 1021, SEQ ID NO: 1242, SEQ ID NO: 1254, SEQ ID NO: 1255, SEQ ID NO: 1257, or SEQ ID NO: 1269.

4. An expression cassette comprising:
a promoter sequence comprising a sequence having at least 80% sequence identity to any one of SEQ ID NO: 13-SEQ ID NO: 17, SEQ ID NO: 167-SEQ ID NO: 707, SEQ ID NO: 1241, SEQ ID NO: 1248-SEQ ID NO: 1253, or SEQ ID NO: 1259-SEQ ID NO: 1263;
a payload sequence under transcriptional control of the promoter sequence, the payload sequence comprising a small RNA payload; and
a termination sequence comprising a sequence having at least 80% identity to any one of SEQ ID NO: 60, SEQ ID NO: 708-SEQ ID NO: 1240, SEQ ID NO: 1242, SEQ ID NO:
1243-SEQ ID NO: 1247, SEQ ID NO: 1254-SEQ ID NO: 1257, SEQ ID NO: 1264-SEQ ID NO: 1272, SEQ ID NO: 1275, or SEQ ID NO: 1287-SEQ ID NO: 1289.

5. An expression cassette comprising:
a promoter sequence comprising a sequence having at least 80% sequence identity to any one of SEQ ID NO: 13-SEQ ID NO: 17, SEQ ID NO: 167-SEQ ID NO: 707, SEQ ID NO: 1241, SEQ ID NO: 1248-SEQ ID NO: 1253, or SEQ ID NO: 1259-SEQ ID NO: 1263;
a payload sequence under transcriptional control of the promoter sequence, the payload sequence comprising a small RNA payload; and
a termination sequence.

6. An expression cassette comprising:
a promoter sequence;
a payload sequence under transcriptional control of the promoter sequence, the payload sequence comprising a small RNA payload; and
a termination sequence comprising a sequence having at least 80% identity to any one of SEQ ID NO: 60, SEQ ID NO: 708-SEQ ID NO: 1240, SEQ ID NO: 1242, SEQ ID NO: 1243-SEQ ID NO: 1247, SEQ ID NO: 1254-SEQ ID NO: 1257, SEQ ID NO: 1264-SEQ ID NO: 1272, SEQ ID NO: 1275, or SEQ ID NO: 1287-SEQ ID NO: 1289.

7. The expression cassette of any one of claims 4-6, wherein the promoter sequence comprises a sequence having at least 90% sequence identity to any one of SEQ ID NO: 13-SEQ ID NO: 17, SEQ ID NO: 167-SEQ ID NO: 707, SEQ ID NO: 1241, SEQ ID NO: 1248-SEQ ID NO: 1253, or SEQ ID NO: 1259-SEQ ID NO: 1263.

8. The expression cassette of any one of claims 4-6, wherein the promoter sequence comprises a sequence having at least 95% sequence identity to any one of SEQ ID NO: 13-SEQ ID NO: 17, SEQ ID NO: 167-SEQ ID NO: 707, SEQ ID NO: 1241, SEQ ID NO: 1248-SEQ ID NO: 1253, or SEQ ID NO: 1259-SEQ ID NO: 1263.

9. The expression cassette of any one of claims 4-8, wherein the termination sequence comprises a sequence having at least 90% sequence identity to any one of SEQ ID NO: 60, SEQ ID NO: 708-SEQ ID NO: 1240, SEQ ID NO: 1242, SEQ ID NO: 1243-SEQ ID NO: 1247, SEQ ID NO: 1254-SEQ ID NO: 1257, SEQ ID NO: 1264-SEQ ID NO: 1272, SEQ ID NO: 1275, or SEQ ID NO: 1287-SEQ ID NO: 1289.

10. The expression cassette of any one of claims 4-8, wherein the termination sequence comprises a sequence having at least 95% sequence identity to any one of SEQ ID NO: 60, SEQ ID NO: 708-SEQ ID NO: 1240, SEQ ID NO: 1242, SEQ ID NO: 1243-SEQ ID NO: 1247, SEQ ID NO: 1254-SEQ ID NO: 1257, SEQ ID NO: 1264-SEQ ID NO: 1272, SEQ ID NO: 1275, or SEQ ID NO: 1287-SEQ ID NO: 1289.

11. The expression cassette of any one of claims 1-10, wherein the promoter sequence comprises SEQ ID NO: 17.

12. The expression cassette of any one of claims 1-10, wherein the promoter sequence comprises SEQ ID NO: 1262.

13. The expression cassette of any one of claims 1-10, wherein the promoter sequence comprises SEQ ID NO: 1250.

14. The expression cassette of any one of claims 1-10, wherein the promoter sequence comprises SEQ ID NO: 1251.

15. The expression cassette of any one of claims 1-10, wherein the promoter sequence comprises SEQ ID NO: 1252.

16. The expression cassette of any one of claims 1-10, wherein the promoter sequence comprises SEQ ID NO: 1253.

17. The expression cassette of any one of claims 1-16, wherein the termination sequence comprises SEQ ID NO: 1264.

18. The expression cassette of any one of claims 1-16, wherein the termination sequence comprises SEQ ID NO: 1265.

19. The expression cassette of any one of claims 1-16, wherein the termination sequence comprises SEQ ID NO: 1254.

20. The expression cassette of any one of claims 1-16, wherein the termination sequence comprises SEQ ID NO: 1255.

21. The expression cassette of any one of claims 1-16, wherein the termination sequence comprises SEQ ID NO: 1257.

22. The expression cassette of any one of claims 1-16, wherein the termination sequence comprises SEQ ID NO: 60.

23. The expression cassette of any one of claims 1-16, wherein the termination sequence comprises SEQ ID NO: 1242.

24. The expression cassette of any one of claims 1-16, wherein the termination sequence comprises SEQ ID NO: 1269.

25. The expression cassette of any one of claims 1-16, wherein the termination sequence comprises SEQ ID NO: 1017.

26. The expression cassette of any one of claims 1-25, wherein the small RNA payload comprises an engineered guide RNA capable of hybridizing to a target sequence.

27. The expression cassette of claim 26, wherein the engineered guide RNA is at least 70%, at least 75%, at least 80%, at least 85%, at least 90%, at least 95%, or 100% reverse complementary to the target sequence.

28. The expression cassette of claim 26 or claim 27, wherein the engineered guide RNA comprises at least one base pair mismatch relative to the target sequence.

29. The expression cassette of any one of claims 26-28, wherein the target sequence comprises an adenosine residue.

30. The expression cassette of any one of claims 26-29, wherein the target sequence is an RNA sequence.

31. The expression cassette of claim 30, wherein the RNA sequence is a mRNA or a pre-mRNA.

32. The expression cassette of any one of claims 26-31, wherein the target sequence comprises a G to A mutation relative to a wild type sequence.

33. The expression cassette of any one of claims 26-32, wherein the target sequence comprises a missense mutation or a nonsense mutation relative to a wild type sequence.

34. The expression cassette of any one of claims 26-33, wherein the target sequence encodes α-synuclein (SNCA), peripheral myelin protein 22 (PMP22), double homeobox 4 (DUX4), leucine rich repeat kinase 2 (LRRK2), Tau (MAPT), progranulin (GRN), a duplication of the PMP22 associated with Charcot-Marie-Tooth disease type 1A (CMT1A), ATP-binding cassette sub-family A member 4 (ABCA4), amyloid precursor protein (APP), alpha-1 antitrypsin (SERPINA1), hexosaminidase A (HEXA), cystic fibrosis transmembrane conductance regulator (CFTR), lipase A (LIPA), glucosylceramidase beta (GBA), PTEN-induced kinase 1 (PINK1), or methyl CpG binding protein 2 (MECP2).

35. The expression cassette of any one of claims 26-34, wherein the payload sequence comprises at least 80%, at least 85%, at least 90%, at least 95%, or 100% sequence identity to SEQ ID NO: 1273, SEQ ID NO: 1274, or SEQ ID NO: 61.

36. The expression cassette of any one of claims 1-35, wherein the small RNA payload comprises an antisense oligonucleotide, an siRNA, an shRNA, a miRNA, or a tracrRNA.

37. The expression cassette of any one of claims 1-36, wherein the small RNA payload is not less than 20 nucleotide residues and not more than 500 nucleotide residues long.

38. The expression cassette of any one of claims 1-37, wherein the small RNA payload is not less than 60 and not more than 100 residues long.

39. The expression cassette of any one of claims 1-37, wherein the small RNA payload is not less than 80 and not more than 120 residues long.

40. The expression cassette of any one of claims 1-37, wherein the small RNA payload is not less than 100 and not more than 140 residues long.

41. The expression cassette of any one of claims 1-37, wherein the small RNA payload is not less than 130 and not more than 170 residues long.

42. The expression cassette of any one of claims 1-41, wherein the payload sequence further comprises an Sm binding sequence or a hairpin sequence.

43. The expression cassette of claim 42, wherein the hairpin sequence comprises a U7 hairpin.

44. The expression cassette of claim 42 or claim 43, wherein the hairpin sequence comprises at least 80%, at least 85%, at least 90%, at least 95%, or 100% sequence identity to SEQ ID NO: 52 or SEQ ID NO: 54, or the Sm binding sequence comprises at least 80%, at least 85%, at least 90%, at least 95%, or 100% sequence identity to SEQ ID NO: 56 or SEQ ID NO: 58.

45. The expression cassette of any one of claims 1-44, wherein the expression cassette has a length of not less than 1300 nucleotide residues and not more than 2160 nucleotide residues.

46. The expression cassette of any one of claims 1-45, wherein the expression cassette comprises at least 80% sequence identity to a U1 sequence or a U7 sequence.

47. The expression cassette of claim 46, wherein the U1 sequence is a mouse U1 sequence or a human U1 sequence.

48. The expression cassette of claim 46, wherein the U7 sequence is a mouse U7 sequence or a human U7 sequence.

49. The expression cassette of any one of claims 1-48, wherein the promoter sequence comprises a zinc finger 143 motif capable of recruiting a ZNF143 transcription factor.

50. The expression cassette of any one of claims 1-49, wherein the promoter sequence comprises an OCT-1 transcription factor binding sequence capable of recruiting an OCT-1 transcription factor.

51. The expression cassette of any one of claims 1-50, wherein the promoter sequence comprises a proximal sequence element capable of recruiting a SNAPc.

52. The expression cassette of claim 51, wherein the proximal sequence element is capable of integrator dependent recruitment of RNA polymerase II.

53. The expression cassette of any one of claims 1-52, wherein the small RNA payload is capable of forming a guide-target RNA scaffold comprising a structural feature upon hybridization of the small RNA payload to a target sequence.

54. The expression cassette of claim 53, wherein the structural feature is a bulge, a mismatch, an internal loop, a hairpin, or combinations thereof.

55. The expression cassette of claim 54, wherein the structural feature comprises the bulge, and wherein the bulge is a symmetric bulge.

56. The expression cassette of claim 54, wherein the structural feature comprises the bulge, and wherein the bulge is an asymmetric bulge.

57. The expression cassette of claim 54, wherein the structural feature comprises the internal loop, and wherein the internal loop is a symmetric internal loop.

58. The expression cassette of claim 54, wherein the structural feature comprises the internal loop, and wherein the internal loop is an asymmetric internal loop.

59. The expression cassette of claim 54, wherein the structural feature comprises the hairpin, and wherein the hairpin is a recruitment hairpin or a non-recruitment hairpin.

60. The expression cassette of any one of claims 43-59, wherein the guide-target RNA scaffold comprises a Wobble base pair.

61. A recombinant polynucleotide encoding one or more of the expression cassettes of any one of claims 1-60.

62. The recombinant polynucleotide of claim 61, encoding two of the expression cassettes of any one of claims 1-60 comprising a first promoter, a second promoter, a first termination sequence, and a second termination sequence.

63. The recombinant polynucleotide of claim 62, wherein the first promoter and the second promoter are the same.

64. The recombinant polynucleotide of claim 62, wherein the first promoter and the second promoter are different.

65. The recombinant polynucleotide of any one of claims 62-64, wherein the first termination sequence and the second termination sequence are the same.

66. The recombinant polynucleotide of any one of claims 62-64, wherein the first termination sequence and the second termination sequence are different.

67. The recombinant polynucleotide of any one of claims 62-66 wherein the first promoter comprises SEQ ID NO: 17.

68. The recombinant polynucleotide of any one of claim 62 or claims 64-67, wherein the second promoter comprises SEQ ID NO: 1262.

69. The recombinant polynucleotide of any one of claims 62-68 wherein the first termination sequence comprises SEQ ID NO: 1264.

70. The recombinant polynucleotide of any one of claims 62-64 or claims 66-69, wherein the second termination sequence comprises SEQ ID NO: 1265.

71. The recombinant polynucleotide of claim 62 wherein (a) the first promotor sequence comprises SEQ ID NO: 17, the first termination sequence comprises SEQ ID NO: 1264, the second promotor sequence comprises SEQ ID NO: 1262 and the second termination sequence comprises SEQ ID NO: 1265; or (b) the first promotor sequence comprises SEQ ID NO: 17, the first termination sequence comprises SEQ ID NO: 1265, the second promotor sequence comprises SEQ ID NO: 1262 and the second termination sequence comprises SEQ ID NO: 1264.

72. A viral vector encapsidating the expression cassette of any one of claims 1-60 or the recombinant polynucleotide of any one of claims 61-71.

73. The viral vector of claim 72, wherein the viral vector comprises two or more, three or more, or four or more expression cassettes of any one of claims 1-60.

74. The viral vector of claim 72 or claim 73, wherein the viral vector is an adeno-associated viral vector.

75. The viral vector of claim 74, wherein the adeno-associated viral vector is selected from the group consisting of AAV1, AAV2, AAV3, AAV4, AAV5, AAV6, AAV7, AAV8, AAV9, AAV 10, AAV11, AAV12, AAV13, AAV14, AAV15, AAV16, AAV-DJ, AAV-DJ/8, AAV-DJ/9, AAV1/2, AAV.rh8, AAV.rh10, AAV.rh20, AAV.rh39, AAV.Rh43, AAV.Rh74, AAV.v66, AAV.Oligo001, AAV.SCH9, AAV.r3.45, AAV.RHM4-1, AAV.hu37, AAV.Anc80, AAV.Anc80L65, AAV.7m8, AAV.PhP.eB, AAV.PhP.V1, AAV.PHP.B, AAV.PhB.C1, AAV.PhB.C2, AAV.PhB.C3, AAV.PhB.C6, AAV.cy5, AAV2.5, AAV2tYF, AAV3B, AAV.LK03, AAV.HSC1, AAV.HSC2, AAV.HSC3, AAV.HSC4, AAV.HSC5, AAV.HSC6, AAV.HSC7, AAV.HSC8, AAV.HSC9, AAV.HSC10, AAV.HSC11, AAV.HSC12, AAV.HSC13, AAV.HSC14, AAV.HSC15, AAV.HSC16, AAV.HSC17, AAVhu68, chimeras thereof, and combinations thereof.

76. A pharmaceutical composition comprising the expression cassette of any one of claims 1-60, the recombinant polynucleotide of any one of claims 61-71, or the viral vector of any one of claims 72-75 and a pharmaceutically acceptable excipient, carrier, diluent, or combination thereof.

77. A method of expressing a small RNA payload in a cell, the method comprising delivering the expression cassette of any one of claims 1-60, the recombinant polynucleotide of any one of claims 61-71, the viral vector of any one of claims 72-75, or the pharmaceutical composition of claim 76 to a cell and expressing the small RNA payload encoded by the expression cassette in the cell.

78. A method of editing a target sequence, the method comprising:
delivering the expression cassette of any one of claims 1-60, the recombinant polynucleotide of any one of claims 61-71, the viral vector of any one of claims 72-75, or the pharmaceutical composition of claim 76 to a cell encoding the target sequence;
expressing the small RNA payload in the cell, wherein the small RNA payload comprises an engineered guide RNA capable of hybridizing to a target sequence;
forming a guide-target RNA scaffold upon hybridization of the small RNA payload to the target sequence;
recruiting an editing enzyme to the target sequence; and
editing the target sequence with the editing enzyme.

79. A method of editing a target sequence, the method comprising:
delivering an expression cassette to a cell encoding the target sequence, wherein the expression cassette comprises:
a promoter sequence comprising a sequence having at least 80% sequence identity to any one of:
a) SEQ ID NO: 17, SEQ ID NO: 1250, or SEQ ID NO: 1262;
b) SEQ ID NO: 13 or SEQ ID NO: 15; or
c) SEQ ID NO: 1241, SEQ ID NO: 1251, SEQ ID NO: 1252, SEQ ID NO: 1253, or SEQ ID NO: 1263;
a payload sequence under transcriptional control of the promoter sequence, the payload sequence comprising a small RNA payload; and
a termination sequence comprising a sequence having at least 80% identity to any one of:
a) SEQ ID NO: 1002, SEQ ID NO: 1017, SEQ ID NO: 1264, or SEQ ID NO: 1265; or
b) SEQ ID NO: 60, SEQ ID NO: 771, SEQ ID NO: 930, SEQ ID NO: 1007, SEQ ID NO: 1021, SEQ ID NO: 1242, SEQ ID NO: 1254, SEQ ID NO: 1255, SEQ ID NO: 1257, or SEQ ID NO: 1269;
expressing the small RNA payload in the cell;
forming a guide-target RNA scaffold upon hybridization of the small RNA payload to the target sequence;
recruiting an editing enzyme to the target sequence; and
editing the target sequence with the editing enzyme.

80. A method of editing a target sequence, the method comprising:
delivering an expression cassette to a cell encoding the target sequence, wherein the expression cassette comprises:
a promoter sequence comprising a sequence having at least 80% sequence identity to any one of:
a) SEQ ID NO: 17, SEQ ID NO: 1250, or SEQ ID NO: 1262;
b) SEQ ID NO: 13 or SEQ ID NO: 15; or
c) SEQ ID NO: 1241, SEQ ID NO: 1251, SEQ ID NO: 1252, SEQ ID NO: 1253, or SEQ ID NO: 1263;
a payload sequence under transcriptional control of the promoter sequence, the payload sequence comprising a small RNA payload; and
a termination sequence;
expressing the small RNA payload in the cell;
forming a guide-target RNA scaffold upon hybridization of the small RNA payload to the target sequence;
recruiting an editing enzyme to the target sequence; and
editing the target sequence with the editing enzyme.

81. A method of editing a target sequence, the method comprising:
delivering an expression cassette to a cell encoding the target sequence, wherein the expression cassette comprises:
a promoter sequence;
a payload sequence under transcriptional control of the promoter sequence, the payload sequence comprising a small RNA payload; and
a termination sequence comprising a sequence having at least 80% identity to any one of:
a) SEQ ID NO: 1002, SEQ ID NO: 1017, SEQ ID NO: 1264, or SEQ ID NO: 1265; or
b) SEQ ID NO: 60, SEQ ID NO: 771, SEQ ID NO: 930, SEQ ID NO: 1007, SEQ ID NO: 1021, SEQ ID NO: 1242, SEQ ID NO: 1254, SEQ ID NO: 1255, SEQ ID NO: 1257, or SEQ ID NO: 1269;
expressing the small RNA payload in the cell;
forming a guide-target RNA scaffold upon hybridization of the small RNA payload to the target sequence;
recruiting an editing enzyme to the target sequence; and
editing the target sequence with the editing enzyme.

82. A method of editing a target sequence, the method comprising:
delivering an expression cassette to a cell encoding the target sequence, wherein the expression cassette comprises:
a promoter sequence comprising a sequence having at least 80% sequence identity to any one of SEQ ID NO: 13-SEQ ID NO: 17, SEQ ID NO: 167-SEQ ID NO: 707, SEQ ID NO: 1241, SEQ ID NO: 1248-SEQ ID NO: 1253, or SEQ ID NO: 1259-SEQ ID NO: 1263;
a payload sequence under transcriptional control of the promoter sequence, the payload sequence comprising a small RNA payload; and
a termination sequence comprising a sequence having at least 80% identity to any one of SEQ ID NO: 60, SEQ ID NO: 708-SEQ ID NO: 1240, SEQ ID NO: 1242, SEQ ID NO: 1243-SEQ ID NO: 1247, SEQ ID NO: 1254-SEQ ID NO: 1257, SEQ ID NO: 1264-SEQ ID NO: 1272, SEQ ID NO: 1275, or SEQ ID NO: 1287-SEQ ID NO: 1289;
expressing the small RNA payload in the cell;
forming a guide-target RNA scaffold upon hybridization of the small RNA payload to the target sequence;
recruiting an editing enzyme to the target sequence; and
editing the target sequence with the editing enzyme.

83. A method of editing a target sequence, the method comprising:
delivering an expression cassette to a cell encoding the target sequence, wherein the expression cassette comprises:
a promoter sequence comprising a sequence having at least 80% sequence identity to any one of SEQ ID NO: 13-SEQ ID NO: 17, SEQ ID NO: 167-SEQ ID NO: 707, SEQ ID NO: 1241, SEQ ID NO: 1248-SEQ ID NO: 1253, or SEQ ID NO: 1259-SEQ ID NO: 1263;
a payload sequence under transcriptional control of the promoter sequence, the payload sequence comprising a small RNA payload; and
a termination sequence;
expressing the small RNA payload in the cell;
forming a guide-target RNA scaffold upon hybridization of the small RNA payload to the target sequence;
recruiting an editing enzyme to the target sequence; and
editing the target sequence with the editing enzyme.

84. A method of editing a target sequence, the method comprising:
delivering an expression cassette to a cell encoding the target sequence, wherein the expression cassette comprises:
a promoter sequence;
a payload sequence under transcriptional control of the promoter sequence, the payload sequence comprising a small RNA payload; and
a termination sequence comprising a sequence having at least 80% identity to any one of SEQ ID NO: 60, SEQ ID NO: 708-SEQ ID NO: 1240, SEQ ID NO: 1242, SEQ ID NO: 1243-SEQ ID NO: 1247, SEQ ID NO: 1254-SEQ ID NO: 1257, SEQ ID NO: 1264-SEQ ID NO: 1272, SEQ ID NO: 1275, or SEQ ID NO: 1287-SEQ ID NO: 1289;
expressing the small RNA payload in the cell;
forming a guide-target RNA scaffold upon hybridization of the small RNA payload to the target sequence;
recruiting an editing enzyme to the target sequence; and
editing the target sequence with the editing enzyme.

85. The method of any one of claims 77-84, wherein the promoter sequence comprises SEQ ID NO: 17.

86. The method of any one of claims 77-84, wherein the promoter sequence comprises SEQ ID NO: 1262.

87. The method of any one of claims 77-84, wherein the promoter sequence comprises SEQ ID NO: 1250.

88. The method of any one of claims 77-84, wherein the promoter sequence comprises SEQ ID NO: 1251.

89. The method of any one of claims 77-84, wherein the promoter sequence comprises SEQ ID NO: 1252.

90. The method of any one of claims 77-84, wherein the promoter sequence comprises SEQ ID NO: 1253.

91. The method of any one of claims 77-90, wherein the termination sequence comprises SEQ ID NO: 1264.

92. The method of any one of claims 77-90, wherein the termination sequence comprises SEQ ID NO: 1265.

93. The method of any one of claims 77-90, wherein the termination sequence comprises SEQ ID NO: 1254.

94. The method of any one of claims 77-90, wherein the termination sequence comprises SEQ ID NO: 1255.

95. The method of any one of claims 77-90, wherein the termination sequence comprises SEQ ID NO: 1257.

96. The method of any one of claims 77-90, wherein the termination sequence comprises SEQ ID NO: 60.

97. The method of any one of claims 77-90, wherein the termination sequence comprises SEQ ID NO: 1242.

98. The method of any one of claims 77-90, wherein the termination sequence comprises SEQ ID NO: 1269.

99. The method of any one of claims 77-90, wherein the termination sequence comprises SEQ ID NO: 1017.

100. The method of any one of claims 78-99, wherein the target sequence comprises a mutation relative to a wild type sequence.

101. The method of claim 100, wherein editing the target sequence corrects the mutation in the target sequence.

102. The method of claim 100 or claim 101, wherein the mutation is a missense mutation.

103. The method of claim 100 or claim 101, wherein the mutation is a nonsense mutation.

104. The method of any one of claims 100-103, wherein the mutation is a G to A mutation.

105. The method of any one of claims 100-104, wherein the mutation is associated with a disease.

106. The method of claim 105, wherein the disease is a synucleinopathy, Parkinson's disease, Lewy body dementia, multiple system atrophy, Charcot-Marie-Tooth disease, hereditary neuropathy with liability to pressure palsies, Yuan-Harel-Lupski syndrome, a tauopathy, Alzheimer's disease, frontotemporal dementia, progressive supranuclear palsy, corticobasal degeneration, chronic traumatic encephalopathy, autism, traumatic brain injury, Dravet syndrome, Crohn's disease, muscular dystrophy, B-cell leukemia, Dejerine-Sottas disease, Stargardt disease, alpha-1 antitrypsin deficiency, Tay-Sachs disease, cystic fibrosis, liposomal acid lipase deficiency, or Gaucher disease.

107. The method of any one of claims 78-106, wherein the target sequence encodes α-synuclein (SNCA), peripheral myelin protein 22 (PMP22), double homeobox 4 (DUX4), leucine rich repeat kinase 2 (LRRK2), Tau (MAPT), progranulin (GRN), a duplication of PMP22 associated with Charcot-Marie-Tooth disease type 1A (CMT1A), ATP-binding cassette sub-family A member 4 (ABCA4), amyloid precursor protein (APP), alpha-1 antitrypsin (SERPINA1), hexosaminidase A (HEXA), cystic fibrosis transmembrane conductance regulator (CFTR), lipase A (LIPA), glucosylceramidase beta (GBA), PTEN-induced kinase 1 (PINK1), or methyl CpG binding protein 2 (MECP2).

108. The method of claim 78-107, wherein editing the target sequence comprises editing an untranslated region of the target sequence.

109. The method of claim 108, wherein the untranslated region is a 5′ untranslated region or a 3′ untranslated region.

110. The method of claim 109, wherein the 3′ untranslated region is a polyadenylation sequence.

111. The method of any one of claims 78-110, wherein editing the target sequence comprises editing a translation initiation site.

112. The method of any one of claims 78-111, wherein editing the target sequence alters expression of the target sequence.

113. The method of claim 112, wherein editing the target sequence increases expression of the target sequence.

114. The method of claim 112, wherein editing the target sequence decreases expression of the target sequence.

115. A method of treating a disease in a subject, the method comprising:
administering to the subject a composition comprising the expression cassette of any one of claims 1-60, the recombinant polynucleotide of any one of claims 61-71, the viral vector of any one of claims 72-75, or the pharmaceutical composition of claim 76;
delivering the expression cassette to a cell of the subject; and
expressing the small RNA payload in the cell, thereby treating the disease.

116. A method of treating a disease in a subject, the method comprising:
administering to the subject a composition comprising an expression cassette comprising:
a promoter sequence comprising a sequence having at least 80% sequence identity to any one of:
a) SEQ ID NO: 17, SEQ ID NO: 1250, or SEQ ID NO: 1262;
b) SEQ ID NO: 13 or SEQ ID NO: 15; or
c) SEQ ID NO: 1241, SEQ ID NO: 1251, SEQ ID NO: 1252, SEQ ID NO: 1253, or SEQ ID NO: 1263;
a payload sequence under transcriptional control of the promoter sequence, the payload sequence comprising a small RNA payload; and
a termination sequence comprising a sequence having at least 80% identity to any one of:
a) SEQ ID NO: 1002, SEQ ID NO: 1017, SEQ ID NO: 1264, or SEQ ID NO: 1265; or
b) SEQ ID NO: 60, SEQ ID NO: 771, SEQ ID NO: 930, SEQ ID NO: 1007, SEQ ID NO: 1021, SEQ ID NO: 1242, SEQ ID NO: 1254, SEQ ID NO: 1255, SEQ ID NO: 1257, or SEQ ID NO: 1269;
delivering the expression cassette to a cell of the subject; and
expressing the small RNA payload in the cell, thereby treating the disease.

117. A method of treating a disease in a subject, the method comprising:
administering to the subject a composition comprising an expression cassette comprising:
a promoter sequence comprising a sequence having at least 80% sequence identity to any one of:
a) SEQ ID NO: 17, SEQ ID NO: 1250, or SEQ ID NO: 1262;
b) SEQ ID NO: 13 or SEQ ID NO: 15; or
c) SEQ ID NO: 1241, SEQ ID NO: 1251, SEQ ID NO: 1252, SEQ ID NO: 1253 or SEQ ID NO: 1263;
a payload sequence under transcriptional control of the promoter sequence, the payload sequence comprising a small RNA payload; and
a termination sequence;
delivering the expression cassette to a cell of the subject; and
expressing the small RNA payload in the cell, thereby treating the disease.

118. A method of treating a disease in a subject, the method comprising:
administering to the subject a composition comprising an expression cassette comprising:
a promoter sequence;
a payload sequence under transcriptional control of the promoter sequence, the payload sequence comprising a small RNA payload; and
a termination sequence comprising a sequence having at least 80% identity to any one of:
a) SEQ ID NO: 1002, SEQ ID NO: 1017, SEQ ID NO: 1264, or SEQ ID NO: 1265; or
b) SEQ ID NO: 60, SEQ ID NO: 771, SEQ ID NO: 930, SEQ ID NO: 1007, SEQ ID NO: 1021, SEQ ID NO: 1242, SEQ ID NO: 1254, SEQ ID NO: 1255, SEQ ID NO: 1257, or SEQ ID NO: 1269;
delivering the expression cassette to a cell of the subject; and
expressing the small RNA payload in the cell, thereby treating the disease.

119. A method of treating a disease in a subject, the method comprising:
administering to the subject a composition comprising an expression cassette comprising:
a promoter sequence comprising a sequence having at least 80% sequence identity to any one of SEQ ID NO: 13-SEQ ID NO: 17, SEQ ID NO: 167-SEQ ID NO: 707, SEQ ID NO: 1241, SEQ ID NO: 1248-SEQ ID NO: 1253, or SEQ ID NO: 1259-SEQ ID NO: 1263;
a payload sequence under transcriptional control of the promoter sequence, the payload sequence comprising a small RNA payload; and
a termination sequence comprising a sequence having at least 80% identity to any one of SEQ ID NO: 60, SEQ ID NO: 708-SEQ ID NO: 1240, SEQ ID NO: 1242, SEQ ID NO: 1243-SEQ ID NO: 1247, SEQ ID NO: 1254-SEQ ID NO: 1257, SEQ ID NO: 1264-SEQ ID NO: 1272, SEQ ID NO: 1275, or SEQ ID NO: 1287-SEQ ID NO: 1289;
delivering the expression cassette to a cell of the subject; and
expressing the small RNA payload in the cell, thereby treating the disease.

120. A method of treating a disease in a subject, the method comprising:
administering to the subject a composition comprising an expression cassette comprising:
a promoter sequence comprising a sequence having at least 80% sequence identity to any one of SEQ ID NO: 13-SEQ ID NO: 17, SEQ ID NO: 167-SEQ ID NO: 707, SEQ ID NO: 1241, SEQ ID NO: 1248-SEQ ID NO: 1253, or SEQ ID NO: 1259-SEQ ID NO: 1263;
a payload sequence under transcriptional control of the promoter sequence, the payload sequence comprising a small RNA payload; and
a termination sequence;
delivering the expression cassette to a cell of the subject; and
expressing the small RNA payload in the cell, thereby treating the disease.

121. A method of treating a disease in a subject, the method comprising:
administering to the subject a composition comprising an expression cassette comprising:
a promoter sequence;
a payload sequence under transcriptional control of the promoter sequence, the payload sequence comprising a small RNA payload; and
a termination sequence comprising a sequence having at least 80% identity to any one of SEQ ID NO: 60, SEQ ID NO: 708-SEQ ID NO: 1240, SEQ ID NO: 1242, SEQ ID NO: 1243-SEQ ID NO: 1247, SEQ ID NO: 1254-SEQ ID NO: 1257, SEQ ID NO: 1264-SEQ ID NO: 1272, SEQ ID NO: 1275, or SEQ ID NO: 1287-SEQ ID NO: 1289;
delivering the expression cassette to a cell of the subject; and
expressing the small RNA payload in the cell, thereby treating the disease.

122. The method of any one of claims 115-121, wherein the promoter sequence comprises SEQ ID NO: 17.

123. The method of any one of claims 115-121, wherein the promoter sequence comprises SEQ ID NO: 1262.

124. The method of any one of claims 115-121, wherein the promoter sequence comprises SEQ ID NO: 1250.

125. The method of any one of claims 115-121, wherein the promoter sequence comprises SEQ ID NO: 1251.

126. The method of any one of claims 115-121, wherein the promoter sequence comprises SEQ ID NO: 1252.

127. The method of any one of claims 115-121, wherein the promoter sequence comprises SEQ ID NO: 1253.

128. The method of any one of claims 115-127, wherein the termination sequence comprises SEQ ID NO: 1264.

129. The method of any one of claims 115-127, wherein the termination sequence comprises SEQ ID NO: 1265.

130. The method of any one of claims 115-127, wherein the termination sequence comprises SEQ ID NO: 1254.

131. The method of any one of claims 115-127, wherein the termination sequence comprises SEQ ID NO: 1255.

132. The method of any one of claims 115-127, wherein the termination sequence comprises SEQ ID NO: 1257.

133. The method of any one of claims 115-127, wherein the termination sequence comprises SEQ ID NO: 60.

134. The method of any one of claims 115-127, wherein the termination sequence comprises SEQ ID NO: 1242.

135. The method of any one of claims 115-127, wherein the termination sequence comprises SEQ ID NO: 1269.

136. The method of any one of claims 115-127, wherein the termination sequence comprises SEQ ID NO: 1017.

137. The method of any one of claims 115-136, wherein the disease is a synucleinopathy, Parkinson's disease, Lewy body dementia, multiple system atrophy, Charcot-Marie-Tooth disease, hereditary neuropathy with liability to pressure palsies, Yuan-Harel-Lupski syndrome, a tauopathy, Alzheimer's disease, frontotemporal dementia, progressive supranuclear palsy, corticobasal degeneration, chronic traumatic encephalopathy, autism, traumatic brain injury, Dravet syndrome, Crohn's disease, muscular dystrophy, B-cell leukemia, Dejerine-Sottas disease, Stargardt disease, alpha-1 antitrypsin deficiency, Tay-Sachs disease, cystic fibrosis, liposomal acid lipase deficiency, or Gaucher disease.

138. The method of any one of claims 115-137, wherein the small RNA payload comprises an engineered guide RNA that hybridizes to a target sequence, and wherein the cell encodes the target sequence.

139. The method of claim 138, wherein the target sequence encodes α-synuclein (SNCA), peripheral myelin protein 22 (PMP22), double homeobox 4 (DUX4), leucine rich repeat kinase 2 (LRRK2), Tau (MAPT), progranulin (GRN), a duplication of the PMP22 associated with Charcot-Marie-Tooth disease type 1A (CMT1A), ATP-binding cassette sub-family A member 4 (ABCA4), amyloid precursor protein (APP), alpha-1 antitrypsin (SERPINA1), hexosaminidase A (HEXA), cystic fibrosis transmembrane conductance regulator (CFTR), lipase A (LIPA), glucosylceramidase beta (GBA), PTEN-induced kinase 1 (PINK1), or methyl CpG binding protein 2 (MECP2).

140. The method of claim 138 or claim 139, further comprising forming a guide-target RNA scaffold upon hybridization of the engineered guide RNA to the target sequence, recruiting an editing enzyme to the target sequence, and editing the target sequence with the editing enzyme.

141. The method of any one of claims 138-140, wherein the target sequence comprises a mutation relative to a wild type sequence.

142. The method of claim 141, wherein editing the target sequence corrects the mutation in the target sequence.

143. The method of claim 141 or claim 142, wherein the mutation is a missense mutation.

144. The method of claim 141 or claim 142, wherein the mutation is a nonsense mutation.

145. The method of any one of claims 141-144, wherein the mutation is a G to A mutation.

146. The method of any one of claims 141-145, wherein the mutation is associated with the disease.

147. The method of any one of claims 140-146, wherein editing the target sequence comprises editing an untranslated region of the target sequence.

148. The method of claim 147, wherein the untranslated region is a 5′ untranslated region or a 3′ untranslated region.

149. The method of claim 148, wherein the 3′ untranslated region is a polyadenylation sequence.

150. The method of any one of claims 140-149, wherein editing the target sequence comprises editing a translation initiation site.

151. The method of any one of claims 140-150, wherein editing the target sequence alters expression of the target sequence.

152. The method of claim 151, wherein editing the target sequence increases expression of the target sequence.

153. The method of claim 151, wherein editing the target sequence decreases expression of the target sequence.

154. The method of any one of claims 78-114 or 140-153, wherein the guide-target RNA scaffold comprises a structural feature.

155. The method of claim 154, wherein the structural feature is a bulge, a mismatch, an internal loop, a hairpin, or combinations thereof.

156. The method of claim 155, wherein the structural feature comprises the bulge, and wherein the bulge is a symmetric bulge.

157. The method of claim 155, wherein the structural feature comprises the bulge, and wherein the bulge is an asymmetric bulge.

158. The method of any one of claims 155-157, wherein the structural feature comprises the internal loop, and wherein the internal loop is a symmetric internal loop.

159. The method of any one of claims 155-157, wherein the structural feature comprises the internal loop, and wherein the internal loop is an asymmetric internal loop.

160. The method of any one of claims 155-159, wherein the structural feature comprises the hairpin, and wherein the hairpin is a recruitment hairpin or a non-recruitment hairpin.

161. The method of any one of claims 78-114 or 140-160, wherein the guide-target RNA scaffold comprises a Wobble base pair.

162. The method of any one of claims 78-114 or 140-161, wherein the editing enzyme comprises an ADAR, an APOBEC, or a Cas nuclease.

163. The method of claim 162, wherein the ADAR comprises ADAR1, ADAR2, ADAR3, or combinations thereof.

164. The method of any one of claims 78-114 or 140-163, wherein the target sequence comprises RNA or DNA.

165. The method of any one of claims 78-114 or 140-164, wherein the target sequence is a mRNA or a pre-mRNA.

166. The method of any one of claims 78-114 or 140-165, wherein editing the target sequence comprises deamidating a nucleotide of the target sequence.

167. The method of any one of claims 78-114 or 140-166, wherein the target sequence is edited with an efficiency of at least 10%, at least 20%, or at least 25%.

The application's sequence listing, which the Patent Office published only in electronic form, follows.

SEQUENCE LISTING (1290 sequences)

SEQ ID NO: 1 - DNA, 514 bp, synthetic construct
  source 1..514: mol_type = other DNA
taacaacataggagctgtgattggctgttttcagccaatcagcactgactcatttgcatagcctttacaagcggtcacaaactcaagaaacgagcggttttaatagtcttttagaatattgtttatcgaaccgaataaggaactgtgctttgtgattcacatatcagtggaggggtgtggaaatggcaccttgatctcaccctcatcgaaagtggagttgatgtccttccctggctcgctacagacgcacttccgcgaccgcaccagcaccgcgacgtggaggacgatgatactcagcaacaggaggagcccactggcggcaagttctgctcagcggagtttctgcccggccaaacagcgtgtggaatttttggagcaggttttctgacttcggtcggaaaacccctcccaatttcactggtctacaatgaaagcaaaacagttctcttccccgctccccggtgtgtgagaggggctttgatccttctctggtttcctaggaaacgcgtatgtg

SEQ ID NO: 2 - DNA, 516 bp, synthetic construct
  source 1..516: mol_type = other DNA
taacaacataggagctgtgattggctgttttcagccaatcagcactgactcatttgcatagcctttacaagcggtcacaaactcaagaaacgagcggttttaatagtcttttagaatattgtttatcgaaccgaataaggaactgtgctttgtgattcacatatcagtggaggggtgtggaaatggcaccttgataagtcaccatgagtgtaaagggagttgatgtccttccctggctcgctacagacgcacttccgcgaccgcaccagcaccgcgacgtggaggacgatgatactcagcaacaggaggagcccactggcggcaagttctgctcagcggagtttctgcccggccaaacagcgtgtggaatttttggagcaggttttctgacttcggtcggaaaacccctcccaatttcactggtctacaatgaaagcaaaacagttctcttccccgctccccggtgtgtgagaggggctttgatccttctctggtttcctaggaaacgcgtatgtg

SEQ ID NO: 3 - DNA, 527 bp, synthetic construct
  source 1..527: mol_type = other DNA
taacaacataggagctgtgattggctgttttcagccaatcagcactgactcatttgcatagcctttacaagcggtcacaaactcaagaaacgagcggttttaatagtcttttagaatattgtttatcgaaccgaataaggaactgtgctttgtgattcacatatcagtggaggggtgtggaaatggcaccttgatctcaccctcatcgaaagtggagttgatgtccttccctggctcgctacagacgcacttccgcgaccgcaccagcaccgcgacgtggaggacgatgatactcagcaacaggaggagcccactggcggcaagttctgctcagcggagtttctgcccggccaaacagcgtgtggaatttttggagcaggttttctgacttcggtcggaaaacccctcccaatttcactggtttcaaaaacagaaaaacagttctcgtttcaaaaacagattccccgctccccggtgtgtgagaggggctttgatccttctctggtttcctaggaaacgcgtatgtg

SEQ ID NO: 4 - DNA, 515 bp, synthetic construct
  source 1..515: mol_type = other DNA
taacaacataggagctgtgattggctgttttcagccaatcagcactgactcatttgcatagcctttacaagcggtcacaaactcaagaaacgagcggttttaatagtcttttagaatattgtttatcgaaccgaataaggaactgtgctttgtgattcacatatcagtggaggggtgtggaaatggcaccttgataagtcaccatgagtgtaaagggagttgatgtccttccctggctcgctacagacgcacttccgcgaccgcaccagcaccgcgacgtggaggacgatgatactcagcaacaggaggagcccactggcggcaagttctgctcagcggagtttctgcccggccaaacagcgtgtggaatttttggagcaggttttctgacttcggtcggaaaacccctcccaatttcactggtttcaaaaacagaaaaacagttctcttccccgctccccggtgtgtgagaggggctttgatccttctctggtttcctaggaaacgcgtatgtg

SEQ ID NO: 5 - DNA, 531 bp, synthetic construct
  source 1..531: mol_type = other DNA
taacaacataggagctgtgattggctgttttcagccaatcagcactgactcatgcaaatcaagagaaatgcaaatagcctttacaagcggtcacaaactcaagaaacgagcggttttaatagtcttttagaatattgtttatcgaaccgaataaggaactgtgctttgtgattcacatatcagtggaggggtgtggaaatggcaccttgataagtcaccatgagtgtaaagggagttgatgtccttccctggctcgctacagacgcacttccgcgaccgcaccagcaccgcgacgtggaggacgatgatactcagcaacaggaggagcccactggcggcaagttctgctcagcggagtttctgcccggccaaacagcgtgtggaatttttggagcaggttttctgacttcggtcggaaaacccctcccaatttcactggtttcaaaaacagaaaaacagttctcttccccgctccccggtgtgtgagaggggctttgatccttctctggtttcctaggaaacgcgtatgtg

SEQ ID NO: 6 - DNA, 514 bp, synthetic construct
  source 1..514: mol_type = other DNA
taacaacataggagctgtgattggctgttttcagccaatcagcactgactcatttgcatagcctttacaagcggtcacaaactcaagaaacgagcggttttaatagtcttttagaatattgtttatcgaaccgaataaggaactgtgctttgtgattcacatatcagtggaggggtgtggaaatggcaccttgatctcaccctcatcgaaagtggagttgatgtccttccctggctcgctacagacgcacttccgcgaccggccacaactccctccttggcctttgaaagtcctttcatgaatacatccacggctaatgaattcctttacaccacactggaaaacataaaatacactttgagtggaatttttggagcaggttttctgacttcggtcggaaaacccctcccaatttcactggtctacaatgaaagcaaaacagttctcttccccgctccccggtgtgtgagaggggctttgatccttctctggtttcctaggaaacgcgtatgtg

SEQ ID NO: 7 - DNA, 650 bp, synthetic construct
  source 1..650: mol_type = other DNA
taaggaccagcttctttgggagagaacagacgcaggggcgggagggaaaaagggagaggcagacgtcacttcctcttggcgactctggcagcagattggtcggttgagtggcagaaaggcagacggggactgggcaaggcactgtcggtgacatcacggacagggcgacttctatgtagatgaggcagcgcagaggctgctgcttcgccacttgctgcttcgccacgaagggagttcccgtgccctgggagcgggttcaggaccgctgatcggaagtgagaatcccagctgtgtgtcagggctggaaagggctcgggagtgcgcggggcaagtgaccgtgtgtgtaaagagtgaggcgtatgaggctgtgtcggggcagagcccgaagatctcaccggccacaactccctccttggcctttgaaagtcctttcatgaatacatccacggctaatgaattcctttacaccacactggaaaacataaaatacactttgagtggaatttttggagcaggttttctgacttcggtcggaaaacccctcccaatttcactggtctacaatgaaagcaaaacagttctcttccccgctccccggtgtgtgagaggggctttgatccttctctggtttcctaggaaacgcgtatgtg

SEQ ID NO: 8 - DNA, 521 bp, synthetic construct
  source 1..521: mol_type = other DNA
ttaacaacaacgaaggggctgtgactggctgctttctcaaccaatcagcaccgaactcatttgcatgggctgagaacaaatgttcgcgaactctagaaatgaatgacttaagtaagttccttagaatattatttttcctactgaaagttaccacatgcgtcgttgtttatacagtaataggaacaagaaaaaagtcacctaagctcaccctcatcaattgtggagttcctttatatcccatcttctctccaaacacatacgcagaccggccacaactccctccttggcctttgaaagtcctttcatgaatacatccacggctaatgaattcctttacaccacactggaaaacataaaatacactttgagtggaatttttggagcaggttttctgacttcggtcggaaaacccctcccaatttcactggtctacaatgaaagcaaaacagttctcttccccgctccccggtgtgtgagaggggctttgatccttctctggtttcctaggaaacgcgtatgtg

SEQ ID NO: 9 - DNA, 516 bp, synthetic construct
  source 1..516: mol_type = other DNA
taacaacataggagctgtgattggctgttttcagccaatcagcactgactcatttgcatagcctttacaagcggtcacaaactcaagaaacgagcggttttaatagtcttttagaatattgtttatcgaaccgaataaggaactgtgctttgtgattcacatatcagtggaggggtgtggaaatggcaccttgataagtcaccatgagtgtaaagggagttgatgtccttccctggctcgctacagacgcacttccgcgaccggccacaactccctccttggcctttgaaagtcctttcatgaatacatccacggctaatgaattcctttacaccacactggaaaacataaaatacactttgagtggaatttttggagcaggttttctgacttcggtcggaaaacccctcccaatttcactggtctacaatgaaagcaaaacagttctcttccccgctccccggtgtgtgagaggggctttgatccttctctggtttcctaggaaacgcgtatgtg

SEQ ID NO: 10 - DNA, 527 bp, synthetic construct
  source 1..527: mol_type = other DNA
taacaacataggagctgtgattggctgttttcagccaatcagcactgactcatttgcatagcctttacaagcggtcacaaactcaagaaacgagcggttttaatagtcttttagaatattgtttatcgaaccgaataaggaactgtgctttgtgattcacatatcagtggaggggtgtggaaatggcaccttgatctcaccctcatcgaaagtggagttgatgtccttccctggctcgctacagacgcacttccgcgaccggccacaactccctccttggcctttgaaagtcctttcatgaatacatccacggctaatgaattcctttacaccacactggaaaacataaaatacactttgagtggaatttttggagcaggttttctgacttcggtcggaaaacccctcccaatttcactggtttcaaaaacagaaaaacagttctcgtttcaaaaacagattccccgctccccggtgtgtgagaggggctttgatccttctctggtttcctaggaaacgcgtatgtg

SEQ ID NO: 11 - DNA, 515 bp, synthetic construct
  source 1..515: mol_type = other DNA
taacaacataggagctgtgattggctgttttcagccaatcagcactgactcatttgcatagcctttacaagcggtcacaaactcaagaaacgagcggttttaatagtcttttagaatattgtttatcgaaccgaataaggaactgtgctttgtgattcacatatcagtggaggggtgtggaaatggcaccttgataagtcaccatgagtgtaaagggagttgatgtccttccctggctcgctacagacgcacttccgcgaccggccacaactccctccttggcctttgaaagtcctttcatgaatacatccacggctaatgaattcctttacaccacactggaaaacataaaatacactttgagtggaatttttggagcaggttttctgacttcggtcggaaaacccctcccaatttcactggtttcaaaaacagaaaaacagttctcttccccgctccccggtgtgtgagaggggctttgatccttctctggtttcctaggaaacgcgtatgtg

SEQ ID NO: 12 - DNA, 531 bp, synthetic construct
  source 1..531: mol_type = other DNA
taacaacataggagctgtgattggctgttttcagccaatcagcactgactcatgcaaatcaagagaaatgcaaatagcctttacaagcggtcacaaactcaagaaacgagcggttttaatagtcttttagaatattgtttatcgaaccgaataaggaactgtgctttgtgattcacatatcagtggaggggtgtggaaatggcaccttgataagtcaccatgagtgtaaagggagttgatgtccttccctggctcgctacagacgcacttccgcgaccggccacaactccctccttggcctttgaaagtcctttcatgaatacatccacggctaatgaattcctttacaccacactggaaaacataaaatacactttgagtggaatttttggagcaggttttctgacttcggtcggaaaacccctcccaatttcactggtttcaaaaacagaaaaacagttctcttccccgctccccggtgtgtgagaggggctttgatccttctctggtttcctaggaaacgcgtatgtg

SEQ ID NO: 13 - DNA, 393 bp, Homo sapiens
  source 1..393: mol_type = genomic DNA
taaggaccagcttctttgggagagaacagacgcaggggcgggagggaaaaagggagaggcagacgtcacttcctcttggcgactctggcagcagattggtcggttgagtggcagaaaggcagacggggactgggcaaggcactgtcggtgacatcacggacagggcgacttctatgtagatgaggcagcgcagaggctgctgcttcgccacttgctgcttcgccacgaagggagttcccgtgccctgggagcgggttcaggaccgctgatcggaagtgagaatcccagctgtgtgtcagggctggaaagggctcgggagtgcgcggggcaagtgaccgtgtgtgtaaagagtgaggcgtatgaggctgtgtcggggcagagcccgaagatctc

SEQ ID NO: 14 - DNA, 263 bp, Homo sapiens
  source 1..263: mol_type = genomic DNA
ttaacaacaacgaaggggctgtgactggctgctttctcaaccaatcagcaccgaactcatttgcatgggctgagaacaaatgttcgcgaactctagaaatgaatgacttaagtaagttccttagaatattatttttcctactgaaagttaccacatgcgtcgttgtttatacagtaataggaacaagaaaaaagtcacctaagctcaccctcatcaattgtggagttcctttatatcccatcttctctccaaacacatacgca

SEQ ID NO: 15 - DNA, 256 bp, Mus musculus
  source 1..256: mol_type = genomic DNA
taacaacataggagctgtgattggctgttttcagccaatcagcactgactcatttgcatagcctttacaagcggtcacaaactcaagaaacgagcggttttaatagtcttttagaatattgtttatcgaaccgaataaggaactgtgctttgtgattcacatatcagtggaggggtgtggaaatggcaccttgatctcaccctcatcgaaagtggagttgatgtccttccctggctcgctacagacgcacttccgc

SEQ ID NO: 16 - DNA, 258 bp, synthetic construct
  source 1..258: mol_type = other DNA
taacaacataggagctgtgattggctgttttcagccaatcagcactgactcatttgcatagcctttacaagcggtcacaaactcaagaaacgagcggttttaatagtcttttagaatattgtttatcgaaccgaataaggaactgtgctttgtgattcacatatcagtggaggggtgtggaaatggcaccttgataagtcaccatgagtgtaaagggagttgatgtccttccctggctcgctacagacgcacttccgc

SEQ ID NO: 17 - DNA, 274 bp, synthetic construct
  source 1..274: mol_type = other DNA
taacaacataggagctgtgattggctgttttcagccaatcagcactgactcatgcaaatcaagagaaatgcaaatagcctttacaagcggtcacaaactcaagaaacgagcggttttaatagtcttttagaatattgtttatcgaaccgaataaggaactgtgctttgtgattcacatatcagtggaggggtgtggaaatggcaccttgataagtcaccatgagtgtaaagggagttgatgtccttccctggctcgctacagacgcacttccgc

SEQ ID NO: 18 - DNA, 257 bp, synthetic construct
  source 1..257: mol_type = other DNA
gaccgcaccagcaccgcgacgtggaggacgatgatactcagcaacaggaggagcccactggcggcaagttctgctcagcggagtttctgcccggccaaacagcgtgtggaatttttggagcaggttttctgacttcggtcggaaaacccctcccaatttcactggtttcaaaaacagaaaaacagttctcttccccgctccccggtgtgtgagaggggctttgatccttctctggtttcctaggaaacgcgtatgtg

SEQ ID NO: 19 - DNA, 257 bp, synthetic construct
  source 1..257: mol_type = other DNA
gaccggccacaactccctccttggcctttgaaagtcctttcatgaatacatccacggctaatgaattcctttacaccacactggaaaacataaaatacactttgagtggaatttttggagcaggttttctgacttcggtcggaaaacccctcccaatttcactggtttcaaaaacagaaaaacagttctcttccccgctccccggtgtgtgagaggggctttgatccttctctggtttcctaggaaacgcgtatgtg

SEQ ID NO: 20 - DNA, 11 bp, synthetic construct
  source 1..11: mol_type = other DNA
gccaatcagca

SEQ ID NO: 21 - skipped

SEQ ID NO: 22 - DNA, 20 bp, synthetic construct
  source 1..20: mol_type = other DNA
ctcaccctcatcgaaagtgg

SEQ ID NO: 23 - DNA, 15 bp, synthetic construct
  source 1..15: mol_type = other DNA
gtctacaatgaaagc

SEQ ID NO: 24 - DNA, 15 bp, synthetic construct
  source 1..15: mol_type = other DNA
actacaattcccagc

SEQ ID NO: 25 - DNA, 19 bp, synthetic construct
  source 1..19: mol_type = other DNA
ttcccagcatgccccgcgc

SEQ ID NO: 26 - DNA, 17 bp, synthetic construct
  source 1..17: mol_type = other DNA
tacccacaatgccctgc

SEQ ID NO: 27 - skipped

SEQ ID NO: 28 - DNA, 24 bp, synthetic construct
  source 1..24: mol_type = other DNA
atgcaaatcaagagaaatgcaaat

SEQ ID NO: 29 - DNA, 32 bp, synthetic construct
  source 1..32: mol_type = other DNA
atgcatattcagcaagagaactgcatattcat

SEQ ID NO: 30 - DNA, 24 bp, synthetic construct
  source 1..24: mol_type = other DNA
atttgcatcaagagaaatttgcat

SEQ ID NO: 31 - DNA, 22 bp, synthetic construct
  source 1..22: mol_type = other DNA
aagtcaccatgagtgtaaaggg

SEQ ID NO: 32 - DNA, 22 bp, synthetic construct
  source 1..22: mol_type = other DNA
aggtcaccgtaactataaaaga

SEQ ID NO: 33 - DNA, 21 bp, synthetic construct
  source 1..21: mol_type = other DNA
acttgacctaagtgtaaagtt

SEQ ID NO: 34 - DNA, 22 bp, synthetic construct
  source 1..22: mol_type = other DNA
aagttaccattacccgtttagg

SEQ ID NO: 35 - DNA, 22 bp, synthetic construct
  source 1..22: mol_type = other DNA
aaatcaccataaacgtgaaatg

SEQ ID NO: 36 - DNA, 22 bp, synthetic construct
  source 1..22: mol_type = other DNA
aagtgaccttgcgtgtaaaggg

SEQ ID NO: 37 - DNA, 22 bp, synthetic construct
  source 1..22: mol_type = other DNA
aatgatcctatatttagagtgg

SEQ ID NO: 38 - DNA, 15 bp, synthetic construct
  source 1..15: mol_type = other DNA
  misc_difference 5..7: note = This region may encompass 0-3 nucleotides
gttynnnaarryaga

SEQ ID NO: 39 - DNA, 17 bp, synthetic construct
  source 1..17: mol_type = other DNA
  misc_difference 5..8: note = This region may encompass 1-4 nucleotides
gtttnnnnaanarnaga

SEQ ID NO: 40 - DNA, 16 bp, synthetic construct
  source 1..16: mol_type = other DNA
gtttaataaaaataga

SEQ ID NO: 41 - DNA, 14 bp, synthetic construct
  source 1..14: mol_type = other DNA
gtttcaaaaacaga

SEQ ID NO: 42 - DNA, 13 bp, synthetic construct
  source 1..13: mol_type = other DNA
gttcaatggctga

SEQ ID NO: 43 - DNA, 17 bp, synthetic construct
  source 1..17: mol_type = other DNA
gttacgcttagaatggc

SEQ ID NO: 44 - DNA, 20 bp, synthetic construct
  source 1..20: mol_type = other DNA
ctgacaatggctacagtcga

SEQ ID NO: 45 - skipped

SEQ ID NO: 46 - DNA, 24 bp, synthetic construct
  source 1..24: mol_type = other DNA
cgtagtaccaagagaacgtagtac

SEQ ID NO: 47 - DNA, 21 bp, synthetic construct
  source 1..21: mol_type = other DNA
actggattcagtacgtacgta

SEQ ID NO: 48 - DNA, 411 bp, synthetic construct
  source 1..411: mol_type = other DNA
agttacagggagcaccaccagggaacatctcggggagcctggttggaagctgcaggcttagtctgtcggctgcgggtctctgactgccctgtggggagggtcttgccttaacatcccttgcatttggctgcaaagaaatctgcttggaagaaggggttacgctgtttggccgggcagaaactccgctgagcagaacttgccgccagagtgctcctcctgttgctgagtatcatcgtcctccacgtcgcggtgctggtgctgctgttcgtctccacgatcgtcagccaatggatcgtgggcaatggacacgcaactgatctctggcagaactgtagcacctcttcctcaggaaatgtccaccactgtttctcatcatcaccaaacgaatggctgcagtctgtccaggccacc

SEQ ID NO: 49 - DNA, 444 bp, synthetic construct
  source 1..444: mol_type = other DNA
ccaagatggatgggagatgctaaatttttaatgccagagctaagaatgtctgctttgtccaatggttaaatgagtgtacacttaagagagtctcacactttggagggtttctcatgatttttcagtgttttttgtttatttttccccgaaagttctcattcaaagtgtattttatgttttccagtgtggtgtaaaggaattcattagccatggatgtattcatgaaaggactttcaaaggccaaggagggagttgtggctgctgctgagaagaccaaacagggtgtggcagaagcagcaggaaagacaaaggagggtgttctctatgtaggtagggaaaccccaaatgtcagtttggtgcttgttcatgagagatgggttaggataatcaatactctaaatgctggtagttctctctctgactacaaggacgacgacgacaagt

SEQ ID NO: 50 - DNA, 391 bp, synthetic construct
  source 1..391: mol_type = other DNA
gggaggagcttgcttctccattctggtgtgatccaggaacagctgtcttccagctctgaatgtggtgtaaaggaattcattagccatggatgtattcatgaaaggactttcaaaggccaaggagggagttgtggctgctgctgagaagaccaaacagggtgtggcagaagcagcaggaaagacaaaggagggtgttctctatgtaggctccaagaccaaggagggagtggtgcatggtgtggcaacagtggctgagaagaccaaagagcaagtgacaaatgttggaggagcagtggtgacgggtgtgacagcagtagcccagaagacagtggagggagcagggagcattgcagcagccactggctttgtcaagaaggaccagttgggcaag

SEQ ID NO: 51 - RNA, 45 nt, synthetic construct
  source 1..45: mol_type = other RNA
gtggaatagtataacaatatgctaaatgttgttatagtatcccac

SEQ ID NO: 52 - DNA, 32 bp, synthetic construct
  source 1..32: mol_type = other DNA
taggctttctggctttttaccggaaagcccct

SEQ ID NO: 53 - RNA, 32 nt, synthetic construct
  source 1..32: mol_type = other RNA
taggctttctggctttttaccggaaagcccct

SEQ ID NO: 54 - DNA, 31 bp, synthetic construct
  source 1..31: mol_type = other DNA
caggttttctgacttcggtcggaaaacccct

SEQ ID NO: 55 - RNA, 31 nt, synthetic construct
  source 1..31: mol_type = other RNA
caggttttctgacttcggtcggaaaacccct

SEQ ID NO: 56 - DNA, 11 bp, synthetic construct
  source 1..11: mol_type = other DNA
aatttttggag

SEQ ID NO: 57 - RNA, 11 nt, synthetic construct
  source 1..11: mol_type = other RNA
aatttttggag

SEQ ID NO: 58 - DNA, 149 bp, synthetic construct
  source 1..149: mol_type = other DNA
aatttttggagcaggttttctgacttcggtcggaaaacccctcccaatttcactggtctacaatgaaagcaaaacagttctcttccccgctccccggtgtgtgagaggggctttgatccttctctggtttcctaggaaacgcgtatgtg

SEQ ID NO: 59 - DNA, 504 bp, synthetic construct
  source 1..504: mol_type = other DNA
taacaacataggagctgtgattggctgttttcagccaatcagcactgactcatttgcatagcctttacaagcggtcacaaactcaagaaacgagcggttttaatagtcttttagaatattgtttatcgaaccgaataaggaactgtgctttgtgattcacatatcagtggaggggtgtggaaatggcaccttgataagtcaccatgagtgtaaagggagttgatgtccttccctggctcgctacagacgcacttccgcgaccgtagacatgggtatggcctctaatttgtaggccccagcagcttcagtcccttactcgtcgtaccagagcacagccagtcgtatgcacggcgtggaatttttggagcaggttttctgacttcggtcggaaaacccctcccaatttcactggtttcaaaaacagaaaaacagttctcttccccgctccccggtgtgtgagaggggctttgatccttctctggtttcctaggaaacgcgtatgtg

SEQ ID NO: 60 - DNA, 106 bp, synthetic construct
  source 1..106: mol_type = other DNA
cccaatttcactggtttcaaaaacagaaaaacagttctcttccccgctccccggtgtgtgagaggggctttgatccttctctggtttcctaggaaacgcgtatgtg

SEQ ID NO: 61 - DNA, 140 bp, synthetic construct
  source 1..140: mol_type = other DNA
gaccgtagacatgggtatggcctctaatttgtaggccccagcagcttcagtcccttactcgtcgtaccagagcacagccagtcgtatgcacggcgtggaatttttggagcaggttttctgacttcggtcggaaaacccct

SEQ ID NO: 62 - DNA, 31 bp, synthetic construct
  source 1..31: mol_type = other DNA
gttttcttttgaacatcttctctttcatcta

SEQ ID NO: 63 - DNA, 23 bp, synthetic construct
  source 1..23: mol_type = other DNA
attcttaccttagaaaattgtgc

SEQ ID NO: 64 - DNA, 75 bp, synthetic construct
  source 1..75: mol_type = other DNA
ccattcttaccttagaaaattgtgcatttacccattttgtgaatgttttcttttgaacatcttctctttcatcta

SEQ ID NO: 65 - DNA, 45 bp, synthetic construct
  source 1..45: mol_type = other DNA
gcaggtacctccaacatcaaggaagatggcatttctagtttggag

SEQ ID NO: 66 - DNA, 43 bp, synthetic construct
  source 1..43: mol_type = other DNA
cctctgtgattttataacttgattcaaggaagatggcatttct

SEQ ID NO: 67 - DNA, 22 bp, synthetic construct
  source 1..22: mol_type = other DNA
aaatcaccataaacgtgaaatg

SEQ ID NO: 68 - DNA, 22 bp, synthetic construct
  source 1..22: mol_type = other DNA
aagtgaccgtgtgtgtaaagag

SEQ ID NO: 69 - DNA, 22 bp, synthetic construct
  source 1..22: mol_type = other DNA
aagtgaccatgtgtgtaaaggg

SEQ ID NO: 70 - DNA, 22 bp, synthetic construct
  source 1..22: mol_type = other DNA
aagtgaccgtgcgtgtaagggg

SEQ ID NO: 71 - DNA, 22 bp, synthetic construct
  source 1..22: mol_type = other DNA
aagtgaccgtgtgtgtaaaggg

SEQ ID NO: 72 - DNA, 22 bp, synthetic construct
  source 1..22: mol_type = other DNA
tcagcaccattttttggatctg

SEQ ID NO: 73 - DNA, 22 bp, synthetic construct
  source 1..22: mol_type = other DNA
atcttacttttatgatcaatgt

SEQ ID NO: 74 - DNA, 22 bp, synthetic construct
  source 1..22: mol_type = other DNA
aagtgaccgtgtgttgagagtg

SEQ ID NO: 75 - DNA, 22 bp, synthetic construct
  source 1..22: mol_type = other DNA
ggcaaactatgttaagggaagt

SEQ ID NO: 76 - DNA, 22 bp, synthetic construct
  source 1..22: mol_type = other DNA
aagtgaccttgcgtgtaaaggg

SEQ ID NO: 77 - DNA, 22 bp, synthetic construct
  source 1..22: mol_type = other DNA
aagtgaccgtgcgtgtaaaggg

SEQ ID NO: 78 - DNA, 22 bp, synthetic construct
  source 1..22: mol_type = other DNA
aatttgccatgagtatgttgtg

SEQ ID NO: 79 - DNA, 22 bp, synthetic construct
  source 1..22: mol_type = other DNA
aatgatcctatatttagagtgg

SEQ ID NO: 80 - DNA, 22 bp, synthetic construct
  source 1..22: mol_type = other DNA
gaaactccatcttaaaaaaaaa

SEQ ID NO: 81 - DNA, 22 bp, synthetic construct
  source 1..22: mol_type = other DNA
tagttaccataactggttggaa

SEQ ID NO: 82 - DNA, 22 bp, synthetic construct
  source 1..22: mol_type = other DNA
ttcttaccgtgacctcaggatg

SEQ ID NO: 83 - DNA, 22 bp, synthetic construct
  source 1..22: mol_type = other DNA
ttctcgccatcagttaaaagtt

SEQ ID NO: 84 - DNA, 22 bp, synthetic construct
  source 1..22: mol_type = other DNA
tactcaccatcagcataatatg

SEQ ID NO: 85 - DNA, 22 bp, synthetic construct
  source 1..22: mol_type = other DNA
cactcaccctcaatgtaatggt

SEQ ID NO: 86 - DNA, 22 bp, synthetic construct
  source 1..22: mol_type = other DNA
aactcacctttgcgaaatagga

SEQ ID NO: 87 - DNA, 22 bp, synthetic construct
  source 1..22: mol_type = other DNA
taattaccacaaccctaccagg

SEQ ID NO: 88 - DNA, 22 bp, synthetic construct
  source 1..22: mol_type = other DNA
tagacaccatcagtgtactagg

SEQ ID NO: 89 - DNA, 22 bp, synthetic construct
  source 1..22: mol_type = other DNA
tagtaaccattgctaatctagt

SEQ ID NO: 90 - DNA, 22 bp, synthetic construct
  source 1..22: mol_type = other DNA
aagttaccattacccgtttagg

SEQ ID NO: 91 - DNA, 22 bp, synthetic construct
  source 1..22: mol_type = other DNA
aaggcaccgtaagtagagggag

SEQ ID NO: 92 - DNA, 22 bp, synthetic construct
  source 1..22: mol_type = other DNA
taggcaccatcggcgtactagg

SEQ ID NO: 93 - DNA, 22 bp, synthetic construct
  source 1..22: mol_type = other DNA
tagtcaccatcactatactagg

SEQ ID NO: 94 - DNA, 22 bp, synthetic construct
  source 1..22: mol_type = other DNA
aatttaccattagcctgttggg

SEQ ID NO: 95 - DNA, 22 bp, synthetic construct
  source 1..22: mol_type = other DNA
caacaaccataagtgtgttaag

SEQ ID NO: 96 - DNA, 22 bp, synthetic construct
  source 1..22: mol_type = other DNA
agctcaccctcatcaattgtgg

SEQ ID NO: 97 - DNA, 22 bp, synthetic construct
  source 1..22: mol_type = other DNA
aactcaccctagcttgtaacgg

SEQ ID NO: 98 - DNA, 22 bp, synthetic construct
  source 1..22: mol_type = other DNA
tgttcacctttaccaaaaaatg

SEQ ID NO: 99 - DNA, 22 bp, synthetic construct
  source 1..22: mol_type = other DNA
tagtcatcatacgcctaatgag

SEQ ID NO: 100 - DNA, 22 bp, synthetic construct
  source 1..22: mol_type = other DNA
tagtcaccctatgtgtaaatta

SEQ ID NO: 101 - DNA, 22 bp, synthetic construct
  source 1..22: mol_type = other DNA
tactcaccctcagctgaaaatg

SEQ ID NO: 102 - DNA, 22 bp, synthetic construct
  source 1..22: mol_type = other DNA
aagttaccccgatgacttggtt

SEQ ID NO: 103 - DNA, 22 bp, synthetic construct
  source 1..22: mol_type = other DNA
aactcaccataactaagagaag

SEQ ID NO: 104 - DNA, 22 bp, synthetic construct
  source 1..22: mol_type = other DNA
tataaaccatgcccaaaggctt

SEQ ID NO: 105 - DNA, 22 bp, synthetic construct
  source 1..22: mol_type = other DNA
ctgtcaccctgaggttaggatg

SEQ ID NO: 106 - DNA, 22 bp, synthetic construct
  source 1..22: mol_type = other DNA
tttaaacctgctgttttgaaga

SEQ ID NO: 107 - DNA, 22 bp, synthetic construct
  source 1..22: mol_type = other DNA
ttctcaccctaatcataaaaca

SEQ ID NO: 108 - DNA, 21 bp, synthetic construct
  source 1..21: mol_type = other DNA
acttgacctaagtgtaaagtt

SEQ ID NO: 109 - DNA, 22 bp, synthetic construct
  source 1..22: mol_type = other DNA
tgcttaccgtaacttgaaagta

SEQ ID NO: 110 - DNA, 21 bp, synthetic construct
  source 1..21: mol_type = other DNA
agttatcctaaccaaaagatg

SEQ ID NO: 111 - DNA, 22 bp, synthetic construct
  source 1..22: mol_type = other DNA
aggttaccgtaaggaaaacaaa

SEQ ID NO: 112 - DNA, 22 bp, synthetic construct
  source 1..22: mol_type = other DNA
cggtcaccgtaagtagaatagg

SEQ ID NO: 113 - DNA, 21 bp, synthetic construct
  source 1..21: mol_type = other DNA
agtcggcctatgtgtacagac

SEQ ID NO: 114 - DNA, 22 bp, synthetic construct
  source 1..22: mol_type = other DNA
aagtcaccctcaccgaaaggcg

SEQ ID NO: 115 - DNA, 22 bp, synthetic construct
  source 1..22: mol_type = other DNA
atatcactgtaaggggaaaatg

SEQ ID NO: 116 - DNA, 21 bp, synthetic construct
  source 1..21: mol_type = other DNA
actcatcctaacttatttaga

SEQ ID NO: 117 - DNA, 22 bp, synthetic construct
  source 1..22: mol_type = other DNA
aagtctccttacctagaaaaga

SEQ ID NO: 118 - DNA, 22 bp, synthetic construct
  source 1..22: mol_type = other DNA
acgcgaccataactctaaaagg

SEQ ID NO: 119 - DNA, 22 bp, synthetic construct
  source 1..22: mol_type = other DNA
aagtcaccatgagtgtaaaggg

SEQ ID NO: 120 - DNA, 22 bp, synthetic construct
  source 1..22: mol_type = other DNA
aggtcaccgtaactataaaaga

SEQ ID NO: 121 - DNA, 13 bp, synthetic construct
  source 1..13: mol_type = other DNA
gttcaatggctga

SEQ ID NO: 122 - DNA, 14 bp, synthetic construct
  source 1..14: mol_type = other DNA
gtttcaaaaacaga

SEQ ID NO: 123 - DNA, 15 bp, synthetic construct
  source 1..15: mol_type = other DNA
gtttctaaaagtaga

SEQ ID NO: 124 - DNA, 13 bp, synthetic construct
  source 1..13: mol_type = other DNA
atgaaaaaataga

SEQ ID NO: 125 - DNA, 14 bp, synthetic construct
  source 1..14: mol_type = other DNA
ctggaaaacgcaga

SEQ ID NO: 126 - DNA, 14 bp, synthetic construct
  source 1..14: mol_type = other DNA
gtttaaagaatagt

SEQ ID NO: 127 - DNA, 13 bp, synthetic construct
  source 1..13: mol_type = other DNA
gtttgatgttaga

SEQ ID NO: 128 - DNA, 13 bp, synthetic construct
  source 1..13: mol_type = other DNA
gttgaaaggtagc

SEQ ID NO: 129 - DNA, 14 bp, synthetic construct
  source 1..14: mol_type = other DNA
gtgtaaaaagcagt

SEQ ID NO: 130 - DNA, 14 bp, synthetic construct
  source 1..14: mol_type = other DNA
gttttaaaaatagg

SEQ ID NO: 131 - DNA, 13 bp, synthetic construct
  source 1..13: mol_type = other DNA
gtggaaagataga

SEQ ID NO: 132 - DNA, 14 bp, synthetic construct
  source 1..14: mol_type = other DNA
gtgcgaatagtagg

SEQ ID NO: 133 - DNA, 14 bp, synthetic construct
  source 1..14: mol_type = other DNA
gttttaaaagtgga

SEQ ID NO: 134 - DNA, 13 bp, synthetic construct
  source 1..13: mol_type = other DNA
gtttaaaagacgg

SEQ ID NO: 135 - DNA, 13 bp, synthetic construct
  source 1..13: mol_type = other DNA
gtttataaaaggc

SEQ ID NO: 136 - DNA, 13 bp, synthetic construct
  source 1..13: mol_type = other DNA
attaaaagaaata

SEQ ID NO: 137 - DNA, 13 bp, synthetic construct
  source 1..13: mol_type = other DNA
gtttaatggaaga

SEQ ID NO: 138 - DNA, 15 bp, synthetic construct
  source 1..15: mol_type = other DNA
tttacaaagaacaga

SEQ ID NO: 139 - DNA, 13 bp, synthetic construct
  source 1..13: mol_type = other DNA
gctcaatgacaga

SEQ ID NO: 140 - DNA, 15 bp, synthetic construct
  source 1..15: mol_type = other DNA
tctagagaaggcagt

SEQ ID NO: 141 - DNA, 14 bp, synthetic construct
  source 1..14: mol_type = other DNA
atgttaatagtagt

SEQ ID NO: 142 - DNA, 14 bp, synthetic construct
  source 1..14: mol_type = other DNA
gtctaaagaaaagg

SEQ ID NO: 143 - DNA, 13 bp, synthetic construct
  source 1..13: mol_type = other DNA
gttgaacaacaga

SEQ ID NO: 144 - DNA, 14 bp, synthetic construct
  source 1..14: mol_type = other DNA
gttcaaacagcagt

SEQ ID NO: 145 - DNA, 13 bp, synthetic construct
  source 1..13: mol_type = other DNA
atccaacaataga

SEQ ID NO: 146 - DNA, 14 bp, synthetic construct
  source 1..14: mol_type = other DNA
gtttaaaaatcaga

SEQ ID NO: 147 - DNA, 14 bp, synthetic construct
  source 1..14: mol_type = other DNA
gttttaaaaacaga

SEQ ID NO: 148 - DNA, 15 bp, synthetic construct
  source 1..15: mol_type = other DNA
gttactaaagagaga

SEQ ID NO: 149 - DNA, 16 bp, synthetic construct
  source 1..16: mol_type = other DNA
gttttataaaaaaaga

SEQ ID NO: 150 - DNA, 14 bp, synthetic construct
  source 1..14: mol_type = other DNA
gttaaaaaatcaga

SEQ ID NO: 151 - DNA, 14 bp, synthetic construct
  source 1..14: mol_type = other DNA
gttttaaaagtaga

SEQ ID NO: 152 - DNA, 13 bp, synthetic construct
  source 1..13: mol_type = other DNA
attaaaagttagg

SEQ ID NO: 153 - DNA, 15 bp, synthetic construct
  source 1..15: mol_type = other DNA
gttgccaatgataga

SEQ ID NO: 154 - DNA, 13 bp, synthetic construct
  source 1..13: mol_type = other DNA
gctgattagcaga

SEQ ID NO: 155 - DNA, 15 bp, synthetic construct
  source 1..15: mol_type = other DNA
gttaggcgaaatatt

SEQ ID NO: 156 - DNA, 15 bp, synthetic construct
  source 1..15: mol_type = other DNA
gtaactgaaaagaga

SEQ ID NO: 157 - DNA, 14 bp, synthetic construct
  source 1..14: mol_type = other DNA
gcctaaaaagtaga

SEQ ID NO: 158 - DNA, 13 bp, synthetic construct
  source 1..13: mol_type = other DNA
cttcaaggatcga

SEQ ID NO: 159 - DNA, 14 bp, synthetic construct
  source 1..14: mol_type = other DNA
gctgcaaggtcagg

SEQ ID NO: 160 - DNA, 13 bp, synthetic construct
  source 1..13: mol_type = other DNA
gttcaagagcagt

SEQ ID NO: 161 - DNA, 13 bp, synthetic construct
  source 1..13: mol_type = other DNA
aagaaaaagaaga

SEQ ID NO: 162 - DNA, 13 bp, synthetic construct
  source 1..13: mol_type = other DNA
gaccaaaggcagg

SEQ ID NO: 163 - DNA, 13 bp, synthetic construct
  source 1..13: mol_type = other DNA
cttcaaacaaagg

SEQ ID NO: 164 - DNA, 15 bp, synthetic construct
  source 1..15: mol_type = other DNA
gtcgctaacgggaga

SEQ ID NO: 165 - DNA, 16 bp, synthetic construct
  source 1..16: mol_type = other DNA
tttttagattaataga

SEQ ID NO: 166 - DNA, 16 bp, synthetic construct
  source 1..16: mol_type = other DNA
gtttaataaaaataga

SEQ ID NO: 167 - DNA, 300 bp, synthetic construct
  source 1..300: mol_type = other DNA
aattgtaccataaaagaatcttgaggatatctttaaaaggtctgctctcttacgaaggtgaagtgtctcccctgtaagcttgtttacaccggcatctgttcagccagccctttttcatagacacttcagccaaatactggcgtgttttccgtttctgtgtttacggttggactcaacgagccttttactattgtggcatatgggagggagcgttgccattctgctgccaggggtgagtgtgatctggtggctgttacattgtgtatatgcgagtaggtctctatcaagaagggacccgcc

SEQ ID NO: 168 - DNA, 300 bp, synthetic construct
  source 1..300: mol_type = other DNA
tggtggcctcaggcgcagcgctaaaacgcatgaaccatttaaggtatttcctgaaactggagcgtgattggtgagactttatttgcatacccacaatgcattgcgcactaaataatgttcgtctttaaaattatttcccctttttccttcaacatatctttctcggaaccgagattgctgtcccagaattgtctgaagaaaaaggctgaagtcaatagctcttttgggccgaaggaaagttaccattacccgtttaggagtagccgttacctgagaactgtagtgtcgacgactgatgtt

SEQ ID NO: 169 - DNA, 300 bp, synthetic construct
  source 1..300: mol_type = other DNA
agattggtcggttgagtggcagaaaggcagacggggactgggcaaggcactgtcggtgacatcacggacagggcgacttctatgtagatgaggcagcgcagaggctgctgcttcgccacttgctgcttcgccacgaaggagttcccgtgccctgggagcgggttcaggaccgcggatcggaagtgagaatcccagctgtgtgtcagggctggaaagggctcgggagtgcgcggggcaagtgaccgtgtgtgtaaagagtgaggcgtatgaggctgtgtcggggcagagcccgaagatctc

SEQ ID NO: 170 - DNA, 300 bp, synthetic construct
  source 1..300: mol_type = other DNA
tcggaagaaccccgagtccattgtaagctcaggggagagcgggagccagggaggtgaagtgcgcagactcggcagcggcggcgggcagaaccgcgggggggtgagagggcgcggtggctgcggggcgggagccgctgctgagaggcggcctgggttgtcttgtggggtgactgtcggtggaatctttggtggagagtggtttggaagaatggcgaggggcggcagtggggagggtggtgaccctgagcgaccggccagggcgaggaggctgtgctgtccctgcaggccatgtgctcattt

SEQ ID NO: 171 - DNA, 300 bp, synthetic construct
  source 1..300: mol_type = other DNA
agattggtcagttgagtggcagaaaagcagacggggactgggcaaggcactgtcggtgacatcacggacagggcgacttctatgtagatgaggcagcgcagaggctgctgcttcgccacttgctgcttcgccacgaaggagttcccctgccctgggagcgggttcaggaccgcggatcggaagagagaatcccagctgtgtgtcagggctggaaagggctcgggagtgcgcggggcaagtgaccgtgtgtgtaaagagtgaggcgtatgaggctgtgtcggggcagagcccgaagatctc

SEQ ID NO: 172 - DNA, 300 bp, synthetic construct
  source 1..300: mol_type = other DNA
agcactttgagacgctgaggtgggtggatcacctgaggtcaagagttcaagaccagcctggccaacatggtgaagcctcatctctaccaaaaatacaaaaaaattagccaggcatggtagtgggcacctgtaatcccagctattcgggaggctgaagcaggagaattgcttgaacccaggaggtggaggttgcagtgagccaagatcgcaccactgcactccagcctgggcgacagagcaagactctgtctcaaaacaaaacaaaataaaacaaaacaaaaacaaacagaaaagctaaga

SEQ ID NO: 173 - DNA, 300 bp, synthetic construct
  source 1..300: mol_type = other DNA
tcctttccagggtggactccactcccactctcacaaaaacatgtagtaggccctgggcattcagctcttccacacactgcatggcttcctgttccaacagcaaagaaaggtttactccaaaatctgaatagtgttaccagaatgttaagataactttaaaatcttttacttacaacagaatcagtagaaacttccatgaacaggacagttttcaaatataagtttatatttgtttaacataatttatagctcagtaaattacaggctgatatgggcaatattaaaagtcatacaaaaaaa

SEQ ID NO: 174 - DNA, 300 bp, synthetic construct
  source 1..300: mol_type = other DNA
gttcctccctcgctcgcgcagccgctcttccccgccactccctcggtgcccgccagcacattcccagcaagccctgagtatatttgcatatcaactcactacatttttttcttctaactaaaaaatcgaaaggacaaattccagattctccttgtgaagtcttcctttcagttcagaagaaatggaattcgctcttcaacttcaggaagttgaaataaagagttgcttggattttgtgttcacctttaccaaaaaatggatttggtaacactgccaccctgctttggtgacagagaaagc

SEQ ID NO: 175 - DNA, 300 bp, synthetic construct
  source 1..300: mol_type = other DNA
aagatcataggataggccacaaacaagtctcaataaatgtaaaaaagttaaaatcctacaaattatgttctctcaccacaacagaattaaattagaattaactttagaaagaaatataggaaatccccaaatatttggaaataagttatttcaaaagaacccatggtcaaagaagaaatcaaaccaaaaaaattagacaatatcttaaaattaatggtaacaaaaaataacatcaaaactcatgaaatagggcaaagtcagtgggaagatggaaatttacacctttaaaagcttgtatta

SEQ ID NO: 176 - DNA, 300 bp, synthetic construct
  source 1..300: mol_type = other DNA
ccccctttgcctttttttttttgagatggagtctggctctattgcccaggcttgagtgcagtggcaccatcctgcctcactgcaacctctgcctcctgggttcaagcgattctcctgcctcagcctcccaagtagctgggactacagacacctacaaccacaccagctaatttttgtatttttagtagagacgaggcttcaccatgttggccaggctggtcttgaactcctgacctcaggtgatccgcccaccttggcctcccaaagtgttgggaggccactgcacccggcctacctttg

SEQ ID NO: 177 - DNA, 300 bp, synthetic construct
  source 1..300: mol_type = other DNA
catgatatatgtttcaaaaagaattagcatagaaatcctggtctcctagccaaaaaaatcaaaggattttcaaaaaaacgaatctgtatgttgaggcaaaaggattgaacctggaagtctgggactttatcatagaaacaaagtctcagatattttagttctttggaaacaaatgctgtaattcaaaagcatttgacctgtcactgtactatctacatgtggaagaatgttcaagttgaatcctaatgccgtgaatgaaacacagtctgtgtagggaatgagcaaaaaagttgaattcca

SEQ ID NO: 178 - DNA, 300 bp, synthetic construct
  source 1..300: mol_type = other DNA
agacacaatggagttacataaaatgctcaattaaaaccagaaaagtcagaaaaatagtagaagaaaaaaaaagaaaaaacccatgacaaaaagctgttataattaaggtagctatccaatcaataatatcaatatcactttaaacgtaaatggtctatcagttaaaagagactatcaaagtggatttaaaaaaaagcaagacctgatagaatgttttccacaaaaaaatcacttcacaagcatgtatctgatagactcatatccaaattatacaaagcattcctaaaatttgacaatgaa

SEQ ID NO: 179 - DNA, 300 bp, synthetic construct
  source 1..300: mol_type = other DNA
gcaagggctcttgtggcaagaagcttacatcagagtgcagaagacagaaagtaaacaataaacatagtaaattagtcagttttctagattgtcagaggtgataaactctatgagaaaagaaagtagaaaaggtaagggggttaggaatgctgggggaggaacagattaccacattaatcaggatggtccatattaaatggtatgccctcattaaagaggtgagatttgagcagtgacttaaaatataatgtaaaccagcagaagatggaagagaaaactaaaatattaaaagtgaaaata

SEQ ID NO: 180 - DNA, 300 bp, synthetic construct
  source 1..300: mol_type = other DNA
aaactagcaacagagaaagctaaaatccaacatgttttgtgttgcagaatcctccaaaagcctcaatctctgtagaaacaaggaagaggcgaaggagactctgaggaagaggattgattttaaaaagtctagtagtcggagccccttcccaacctcacacagctgggcatctgctcctctgtcagtacaatgaaagaataaagtcatattccctggagttaataaagcagagggtctccgtacagggagtgagtgttaaggtcaggggttctatacactgaacttagaaagcgtacgtgc

SEQ ID NO: 181 - DNA, 300 bp, synthetic construct
  source 1..300: mol_type = other DNA
gcagagggtggggcggaagagcagacggggacgggaaaggcgctgtcggtgacatcacagatagggcgattcctatgcagaggaggcagctcaggggctgctgcttcgccaggaaagatttctcgtgctgtgggagctagtccaggacttccggttggacgtgatagtcccagctgtgtgtcagggctaggaggacttgaggcggcatgggggcggggtgggggaatgcgcggggcaagtgaccgtacgtgtaaggggtgaggcgtatggagctgtggcagggcggaggtgcgttcattc

SEQ ID NO: 182 - DNA, 300 bp, synthetic construct
  source 1..300: mol_type = other DNA
taccaaagatgatgaaaataagtatatgtacaaaatattttagtatttatgtgcctgtaaatacaaaaggagcaataaaagtgatttcatttcagaaggtgaacattttgaaagaaataatattcatgtaaattctgaactaaaatagaatgaaataaaattctgaaataagataaaaatagaatgttagcattataggaaactatggagattatttgagctaatcttctcattttatgtatatggaagctgagaagtgacatatccatagtcatacagctaataaataatcaggatgga

SEQ ID NO: 183 - DNA, 300 bp, synthetic construct
  source 1..300: mol_type = other DNA
gcgttgggtgaggcggaagagcagacggggatccagaaggcgttgtcggtgacatcacggagagggcgatttctatgtagatgaggcagcgcaggggctgctgcttcgccacctgctgcttcgccacgaaagagttcccgtgccgtgggagtaagtctgggacctctggtcggaccggagagtcgcagctgtgtgttagggctaggatggctcctggatgcgcgtgacgcaagtgaccttgcgtgtaaagggtgaggcatatgaggctgcggcggggcggaggggcgtgagcttatactt

SEQ ID NO: 184 - DNA, 300 bp, synthetic construct
  source 1..300: mol_type = other DNA
cggagggtggggcggaagagcagacggtgtctgggaaaggcgctgtcggtgacatcacggatagggcgatttctatgtagatgaggcagcgcaggggctgctgcttcgccactaaggagttcccgtgccgtgggagcgggttcaggaccgctggtcggacctgagagtcccagctatgtgtcagggctaggagggctgggggcggggggggtggggggggggggcgtgcgcggggcaagtgaccgtgcgtgtaaagggtgaagcgtgtgaggctgtggcggggcggaggtgcaaaagctc

SEQ ID NO: 185 - DNA, 300 bp, synthetic construct
  source 1..300: mol_type = other DNA
gggtttggaagaaccccgcgtccactgtaagctcaggggagagcgggagccagggaggtgaagtgcacagactggacagaggcggcgggcagaaccgcgggggtgagagggcgcgtggttgcggggcgggagccactgctgaaaggcggcctgggttgtcgtgtggggtgactgtcggtggaatctttggcagagagtggtttggaagaatggcgaggggggcagtgggtagggtggtgaccctgagcgtccgaccagggcgaggacgctgtgctgtccctgcagggcatgcgctcattc

SEQ ID NO: 186 - DNA, 300 bp, synthetic construct
  source 1..300: mol_type = other DNA
gtggggcggaagagcagacggggactgggaaaggcgctgtcggtgacatcacggatagggcgatttctatgtagatgaggcagcgcaggggctgctgcttcgccactaaggagttcccgtgccgtgggagcgggttcaggaccgctggtcggacctgagagtcccagctgtgtgtcagggctaggagggctgtgggcggtgggggggtggggtgggggggggggcgttcgcggggcaagtgaccgtgcgtgtaaagggtgaagcgtgtgaggctgtggcggggcggaggtgcaaaagctc

SEQ ID NO: 187 - DNA, 300 bp, synthetic construct
  source 1..300: mol_type = other DNA
gtaggctgagcggcagaaaggcagacggggactgggaaaggcactgtcggtgacatcacggatagggcgacttctatgtaaatgaggcagcgcaggggctgctgcttcgccacgaaggatttcccgtgccgtgggagcgggttcaggaccgctggtcggacctgagagtcccagctgtgtgtgagggctaggagggctgggggtgggggggggtggggggggggggtgcgcggggcaagtgaccgtgcgtgtaaagggtgaagcgtgtgaggctgtggcggggcggaggtgcaaaagctc

SEQ ID NO: 188 - DNA, 300 bp, synthetic construct
  source 1..300: mol_type = other DNA
gcagagggtggggcggaagagcagacggggacgggaaaggcgctgtcggtgacatcacagatagggcgattcctatgcagaggaggcagctcaggggctgctgcttcgccacgaaagatttctcgtgctgtgggagctagtccaggacctccggttggacgtgatagtcccagctgtgtgtcagggctaggaggacttgaggcggcatgggggcggggtgggggaatgcgcggggcaagtgaccgtgcgtgtaaggggtgaggcgtatggagctgtggcagggcggaggtgcgttcattc

SEQ ID NO: 189 - DNA, 300 bp, synthetic construct
  source 1..300: mol_type = other DNA
tcccaagaggggttcggaggaaccccgcgtccactgtaagctcaggggggagccggagccagggaggtgaagtgcacagactggacagaggcggcgggcagaaccgcgggggtgagagggcgcggtggctgcggagcgggagccgctgttgaaaggaggcctgggttgtcctgtgggtgactgttggtggaatctttcgcggaaagcgttttggaagaatggcgcgacgagcgagcagaggggaaggtggtgaccctgagcgctcggctaggggagaggaggctgtgctgtttctcctct

SEQ ID NO: 190 - DNA, 300 bp, synthetic construct
  source 1..300: mol_type = other DNA
ggctgagtggcggaagatggggcgggaaagttgacggagacgggaaaggcgctgtcggtgacatcacggatagggcgacttctatgtagatgaggcagcgcaggggccgctgcttctccacctgctgcttcgccacgaaggagttccgtgctgtgggagcgagtccaggacagctggtcggacctcagagtcccagctgtgtgtcagggctaggagggctcggggacgcgcggggcaagtgaccgtgcgtgtaaaggttgaggcgtatggagctgtggcggggcggaggtgtgcaaatcc

SEQ ID NO: 191 - DNA, 300 bp, synthetic construct
  source 1..300: mol_type = other DNA
taggtccgctgaggggcgttgggtgaggcggaagagcagacggggatccggaaggcgttgtcggtgacatcacggagagggcgatttctatgtagatgaggcagcgcaggggctgctgctttgccacgaaagagttcccgtgccgtgggagcaagtctgggaccgctggtcggaccggagagtcgcagctgtgtgttagggctaggatggctccgggatgcgcgtgacgcaagtgaccttgcgtgtaaagggtgaggaatatgaggctgcggcggggcggaggggtgtgagcttatactt

SEQ ID NO: 192 - DNA, 300 bp, synthetic construct
  source 1..300: mol_type = other DNA
gggcggaagagcagacggggactgggaaaggcgctgtcggtgacatcacggatagggcgatttctatgtagatgaggcagcgcaggggctgctgcttcgccactaaggagttcccgtgccgtgggagtgggttcaggaccgctggtcggacctgagagtcccagctgtgtgtcagggctaggagggctgtgggtggtggggggggggggtgggggggggggggcgtgcgcggggcaagtgaccgtgcgtgtaaagggtgaagcgtgtgaggctgtggcggggcggagagtgcaagagttc

SEQ ID NO: 193 - DNA, 300 bp, synthetic construct
  source 1..300: mol_type = other DNA
gcgttgggtgaggcggaagagcagacggggatccggaaggcgttgtcggtgacatcacggagagggcgatttctatgtagatgaggcagcgcaggggctgctgcttcgccacctgctgcttcgccacgaaagagttcccgtgccgtgggagcaagtctgggacctctggtcggaacggagagtcgcagctgtgtgttagggctaggatggctccgggatgcgcgtgaggcaagtgaccttgcgtgtaaagggtgaggaatatgaggctgcggcggggcggaggggcgtgagcttatactt

SEQ ID NO: 194 - DNA, 300 bp, synthetic construct
  source 1..300: mol_type = other DNA
cagagctagagccgagattttaaagatggtaggttaacaccataaaagacaacaattttgaaagcagttgggtgaaagcagtatgtaagttagtaatatttaaataaaactatcctggaggaattgttactgagttaattgttgctgtaataaacactaagaccttggaggaaaaacgacgctgtcctaatgaaaatcagacattaattagcatagaaatggcaccgcgatgccgctctaatttccctttggttggtttccatggaaatctgtaggtaaagtgtgcttttaaaagtgttt

SEQ ID NO: 195 - DNA, 300 bp, synthetic construct
  source 1..300: mol_type = other DNA
cgaggtcaggaattcgagaccagcctggccaacatgttgaaaccccgtctctactaaaaatacaaaaattagccaggtgtggtggtggttgcctgtaatcccagctacttgggaggctaaggtaggagaatcgcttgaaaccggaaggtggaggtagcagtgagccaagatcacgccactgcactctagcctgggcaacgagcgaaactgtgtctcaaaaaacaacgaaacaaacaaacaaacaaaaaagtttttgaagaaagtcaaaagaatgtattctgtattctaaaaatgcattct

SEQ ID NO: 196 - DNA, 300 bp, synthetic construct
  source 1..300: mol_type = other DNA
tggagtctcgctctgtcgtacaagctggagtgctgtggcgcaatcttggctcgctgcaacctccacctcccgggttcaagtgattctcctgcctcagcctcccgagtaactgggattacaggcgcgtaccaccatgcctggctaatttttgttgtatttttagtagagatggggtttcaccatgttggtcaggctgatcttgaatccctgaccttgtgatctgtccacctcagccttccaaattgctgggattacaggcgtgagccctgtgcctggcatatgtttaaaagttgattggac

SEQ ID NO: 197 - DNA, 300 bp, synthetic construct
  source 1..300: mol_type = other DNA
acaagcaatggggaaaggattccctattcaatacatgatcctggaataacatatgcagaagattaaaactggacccctttatttcactatgtataaaaaatcaactcaagatggattaaagaataaaatataaaacttaaactataaaatccctagaagaaagcataggaaataccattctggacataagaactggcaaagatttcataacaaggacaccaaaagtcattgcaacaaaaacaaaaattgacaggtgagacctaattaaacttaagtgcttctgcatggcataagaaacta

SEQ ID NO: 198 - DNA, 300 bp, synthetic construct
  source 1..300: mol_type = other DNA
ttttataaggagtaaacaaagctagaaagaaccaggtatggggaagtgaggcaaacgggtgacgtgatcagatagatcagagactattttacctggaggccagtttattctccggaggggctgtatgctttttcaggataatggtggggcaaaatttaggggtctggaggaaggagagagcttaaccaaaattttattaaggggcattttgttccaattgatcaaaattttcttctttctgtacagaggctacagttgcctcatggtctgtatgtcctggtcatcagaaaacattattca

SEQ ID NO: 199 - DNA, 300 bp, synthetic construct
  source 1..300: mol_type = other DNA
accctaaagaccgtcgggtgggggctgagggcgaggggcgggacaccggggccgcgggcggggcgcacccggaaccccgacagctgtgtcttggtggagctgtggactgcgcccgccgactcccacggccggggcggcgctgaagcagagagaggcctgggtgggagagccggccccgggcagggtgcgggcgttgaaaagtgcgtgtctgcaggtgccaacccgggctgtgaagactcatctcctggagggttcctaatgtcatgctagagggctgacggagatacagaagctcatcgc

SEQ ID NO: 200 - DNA, 300 bp, synthetic construct
  source 1..300: mol_type = other DNA
cctctaatatttctgaagcagtgtctggcatgtaggaaactctatgtgagcagttgttaaatatataagtgtttgaatctcctgagtgtttcaattgttcagcaaatttataatccacttacgtttactttcaccatcttctgcaatgaatattatgagaaactccacatgctttgcagaaatctatttacatggtgtctggagtttttgatcaacatagcagtcacttaataaaggcagtgaagttagtttgaaatcactttatgaacagtaaaatatttgttattaatattattacaa

SEQ ID NO: 201 - DNA, 300 bp, synthetic construct
  source 1..300: mol_type = other DNA
ctcactgctgcacagttggccccctgtctctgtgggttctgcatttgtaaattcaaccaactgcaaatcgaaaatatttgggaaaaaaattcatctgtactgaacatgtacagacttttttcttgtcgttattccctaaacaatacagtataacaactatttacatagcatttacagtgtattaggtattataagtaatccagagatgatttaaagtatacaggcctatggatgtaggttatatgcaaatactatgccattttatatcagggacttgagcaccttcagatattggtatct

SEQ ID NO: 202 - DNA, 300 bp, synthetic construct
  source 1..300: mol_type = other DNA
aggcgggaggatctctagagcccaggagttcaagaccagcctgggccacatactgagacctcatctctactaaaaaagtttaaaaattagccagatatggtagcacacacctgtagtcccagctaatcgggcggctgagttgggaagatcgcttgagcacaggatgtcaaggctgcagtgagctatgatcatgccactacactccagtctgggtgacagagcaagaccctttctctaaaaaataaaaataaataaataacataaataaataaataaataacaaaaataaataaaaatcta

SEQ ID NO: 203 - DNA, 300 bp, synthetic construct
  source 1..300: mol_type = other DNA
tatgaattgtttagagctgcactgtctgacatggtagccattaaccacgtgtggtcatcgagtgcttgacacgtggccagtagaaattaagatgcgctgtgtatgtaaaatacacacccaatttcaaaaactcagtacaagtgaaaatgtaagctattttcgtaatttttgtataatgattacatgtgaaatgataatagcttatataatattaggttaaagaaagcattagaattaatttcatctgtctcttttcacctcttaatgtggttactaaaaaattttaaattacatatgtga

SEQ ID NO: 204 - DNA, 300 bp, synthetic construct
  source 1..300: mol_type = other DNA
aatggggacaggaaataaagcaaagcctcagagtcctcctcccaaacacaggagagcaccaggggctttttttcttagagactgtgcccctcctctgattacacaccttctctctaccctccatgcatgaagttccccactgttttcactcttctttcctcgtggcatacattatgatttcacttttggtggccaataatagttcactctctatatatttgttgagcacttactatgaactggacactcttctagatgctgggaatgcaacagtgaacaaagacaaaaacccttgccttc

SEQ ID NO: 205 - DNA, 300 bp, synthetic construct
  source 1..300: mol_type = other DNA
tgaacttaaaagttaaaaaaacacaaaaataaaataggggttataagcaaaatgtgtgcaacaggtggtacatgtgtaaagactgtcaagattgggttgaaaagtctgtgagagtgcctttgcagcttgcttctctgagccttaaggtgttccacctctaaaattggttgaaatgaggtattgtatggaaaaggctttggtaaacgaggaagtgctatacaaatgtcaaatattagttttttcattagttatattgttattttatgtcactgttataacattgacattctgttcagtgtt

SEQ ID NO: 206 - DNA, 300 bp, synthetic construct
  source 1..300: mol_type = other DNA
atagagaaacacaagatacaaacccaaagtgaaggagtgaaagagtgagggacataacattatgtagagatgtgaactggaccacttgtgaagagatggtttttgatacaagaaacacttcccccactgtattacattgagcaatatgaaactggcatgttcaaccatttttgaaatataaaagtaaaaatttcatatagttcaatgttatggtagaaaagaaacaagagaaagcagctacaaatgcacttagatttatagatttagtggtggaaatttaaagaagcacctgtctctcca

SEQ ID NO: 207 - DNA, 300 bp, synthetic construct
  source 1..300: mol_type = other DNA
tgctcttctaagaattcttaccactgggacattttgttgacataaggcactgtgtctctatgaaacaaaatgggactctagcagagaaaacatatcaaattacttgaaagattcttgagtattgatttatatcaggggttggcaaacattctctaatgggccacatagtaaatattttaagctttgaaggccatatgatctctgctgcaacttctcaacttggccattatagggtgaaagtagccatagacaatacataaatcaatgtgtgtggctgtgttccaataaaactttatttat

SEQ ID NO: 208 - DNA, 300 bp, synthetic construct
  source 1..300: mol_type = other DNA
gaggcaggagaatagctggaacccggaggcggaggttgcagtgagccaagattgtaccactgcaccctagcctgggcaacagcgagattcagtctcaaaaaaaaaaaaaaaataataataataaataaataaataaataaataaaatttaaccaggcatggtggtgtgtgcctgcagtcccagctacctgggaggctaaggtaggaaggtcccttgagcacaggagtttgaggctgcagcgggccatgtaacgccattgcactgcagcctgggtgacagagtgcgaccctgtctcgaagg

SEQ ID NO: 209 - DNA, 300 bp, synthetic construct
  source 1..300: mol_type = other DNA
cctgagatcctgccttctccagcagtgcttagtgaataaggtacgattctgtgtacccagagccactgggctgcccaacacacagtcataattagcttccttgtggggtgcctagaatacagggatgagtgagggcacagatcctgcctgccggagctgagagaatttcatttccctgtagtgacagagtgtgtgtccagggagttgcaggatttccatggccacccctaggctctcctgacctgttcaacagtgaccattccttctgaaatattatttcacttataaaaagcttcctac

SEQ ID NO: 210 - DNA, 300 bp, synthetic construct
  source 1..300: mol_type = other DNA
gtatataatacatataacatgcaaaatttgtgttgtttatattatttgtcaaagcttctggtcaacagtaggctgttagtatttaagttttggggaagacaaaagttatatatggattttcaacctcattggagggttgacacctctgacccccatgcggttcaagggtcaactgtactctctattttaattgggataatggttacagatgtgtatgtatttgtcaaaactgaccaaattgttcacttaaaatatatgcattttattgtttgcaaattatactgtaataaaagtcaaaca

SEQ ID NO: 211 - DNA, 300 bp, synthetic construct
  source 1..300: mol_type = other DNA
aggctgcactgtcccaggggcacccagcctccaaatgagcctcaaggaagggtctggaaggccagacaatactatggtcagattatggacttgggaattgctgcagatgccattgggggtaaggaagattaggaaattctggaactcaggagctgcccaggcagccagactgcctctgacacacccagtcctcatttggatttgaggaaaggagacttgagcgcaggagaaaggcacccaggagcctgtgagtcgtgcctaagcctctggatcccacatctgaggaaacaacttaatgta

SEQ ID NO: 212 - DNA, 300 bp, synthetic construct
  source 1..300: mol_type = other DNA
agatcgaaaagaagtcattcatgaaatgaaattttctccagatggttcttaccttgcagtgggatccaatgatggcccagtagatgtctatgctgttgcccagaggtataagaaaattggagaatgcagcaagtcccttagtttcatcacgcatattgactggtccttggatagtaaatacttacaaactaatgacggtgcaggagaacgattgttctacagaatgccatgtaagtcatgtggaggccttggatgtttctggaaagcaaaattttgaaccaggtgaaggaaatacaggac

SEQ ID NO: 213 - DNA, 300 bp, synthetic construct
  source 1..300: mol_type = other DNA
tgcctaccatatgcctaacaaagagaaataggagataggcttcccgtccttagagagtttatgacatctccgaagagacaagatcaagtgcgaaagacagattggaacactacaagaaggaacctagcaaagctccgaattgcttcttgggcagaaccgagtacctgatagaccattgggtactggggtcacctggtaggaagcagagagagaatcatttaccatggagttacatggtagttaccagaaatttgttttgttttcttttttaagttgttgttaaaaatatttttctcagat

SEQ ID NO: 214 - DNA, 300 bp, synthetic construct
  source 1..300: mol_type = other DNA
tgatatgtatctattaaaatgcctacagcaagcattatcctaaataagagaaatatcagaaacattcgctttgaagttaagaatgagaaaccaaggcacacttttaccacttgtattcaacatcgtagtgaaggtcatagccagagcagtgagcattgtagccagtgtacagtaagaccccccaaaaagtagaggcataggattgaaaaatgaggaaataaaactataattatttgaaattattatagtgataacccaaaagatatataaatggattatttagataagtttaaaagagtg

SEQ ID NO: 215 - DNA, 300 bp, synthetic construct
  source 1..300: mol_type = other DNA
aatttgtaatacatcaggggtttcaataatggaattcacagccagctgacaaacaggtttttattaatgacacaagttttcaatgaagaattttagcaaaacaactattttaagcaattgcatttccaaacaaaaaaaagatgcacagcagtatgtataagcctcttgaattatagaattatttatattagcaaataaaaaaactaacctagatgtctaataagaagtagtaaaaggctaataaaatagcaaaatgtttacaatattgttgaatgaaaatcatttcaaaaaatagatcta

SEQ ID NO: 216 - DNA, 300 bp, synthetic construct
  source 1..300: mol_type = other DNA
aaacaaaacacagtaatggagatgagatgcgcttttgatgggcccatcagtataatttgtagagctgggtagagaataagtaaacttaaagatattacccaaaataaaatgcaaagaggaaaaaagcaaaaaaaatctcaagacagtacagataatccaagaactgtaggacaatatcagaaatatcagacagtctaacataagcataattagaattccagaagaagaagaaagataaaattaggcagaaaacgtatctgagaaaaataatggctgagaacttttaaaaattagtgacag

SEQ ID NO: 217 - DNA, 300 bp, synthetic construct
  source 1..300: mol_type = other DNA
tgccaaataataacaaaatataataaaaaatataaaaagaaaaagaaacaccagatggatttcccattcttgaaatgaaccactattaacagttgtgtgattttctttgtttctaatcttcaaaacaaacatatacacccatacaattacacatatacatataatgaacagtgcattttttcccttcaatttcagtttaacatataaatctactatctctctatctatctatctatctatctatctatctatctatctatctgtgtatcaatcatcatttatctatttatctaacatcac

SEQ ID NO: 218 - DNA, 300 bp, synthetic construct
  source 1..300: mol_type = other DNA
tagctgcgggtggagttcaagagcgcgccgcggtcccgcccccgccagccccgccccggcgagaaaagcgtatgcaaattttcgagcggccgacgcgcggtcttctgggtaaaaccgagccgccgcttttgcgacccttcgggagcctcagaaaacaaagaattggggtgtcgtcgaaagctgtggaggctggaggtaagctagctaccagaccgactagggcgaggctcacgaattaattaccacaaccctaccaggtattggcgcttcctgcttgcagcccagggactttctattata

SEQ ID NO: 219 - DNA, 300 bp, synthetic construct
  source 1..300: mol_type = other DNA
aaaaaattgacgcctgagtactttgggtgcctttaaaatgtttgcctccagtagagtgcctcattcacctcactctatcccgcctggttgcagagccacggtagtgaatggtttaccctcagatagacagtggggtcccaccaagccgtttcctgctgtcccactgcaagatgcatgacaaaccgccctgcacctgaggttattaagacagacttgggagagaagacgagaccaggcagagagacaaagacagaaaaagagactgaggaaaactgaaggacaaaggtggaaagaagtgga

SEQ ID NO: 220 - DNA, 300 bp, synthetic construct
  source 1..300: mol_type = other DNA
cagaaagaacctttgggcccaggaccctgggttttgtaagaaccagtctttgggagaacagacctaaaccctcttcttctaaagtgagtggtgtttttactagttgcttcttcaaactttgtaattcgagtccttctttaaagtaacaaaaatgtttttaaagtcttctgctgaatctcttaccaaacaataaccttcaagttttggtgaaaccattacttttatatgttgagcttgcttaaaacaaggcacgcaagtaatcctgtgacatactccattttcttcaaaaactgatgaaca

SEQ ID NO: 221 - DNA, 300 bp, synthetic construct
  source 1..300: mol_type = other DNA
aaatccaattctgatcaaacttgttataagttgtcttgcaaaaaatgttatcacatttggtaatcctacacttttgtaatttaaaaacatagagtttgcaaactcatggtcatgattgttttgtttgtcccacataatctttttccaaagtctattttacttaccgtctttaaaaaataagagagttcagaagataattttaaattccagatttctaggaaaaaaagagggagaggggctaatttgacagtgcacagtttgaatttctacttagcaatattcttccaaagcacaggggct

SEQ ID NO: 222 - DNA, 300 bp, synthetic construct
  source 1..300: mol_type = other DNA
aatgttgtgtttttgttgtttgtacaattttactagtgcctagttcacaatccaaatacaaatctaggtgatttttgaataatagatgatacttgttaaactcttactatatcactactgttccaagcactgtgagatattttcccatttaggcatctaacagttctgtgaaattaatactgtgaagcacagggagattaaatgacttctgacaggacacatagcaaataagtaatggagctgggattcgcgctcaagaaatatgactccatggcctcacttaagttcacacactgtgat

SEQ ID NO: 223 - DNA, 300 bp, synthetic construct
  source 1..300: mol_type = other DNA
tacgaatgattgcatcttcctctttaaactgttttgttttttaatagaaaaaacttcaattttgccaactcttccccattttaattgttagtttgagctccttctttcacatcctccatttgacaaattagtatcgacatcttgcaaagtctgatgatacctttttaacttttttcttcttttttatatacaagtcaagtcttctggggttttttattggtagttttctattattctattttagtagagactatgttattttaatttttactattatatatgtgtgtgtgtgtgtgtgta

SEQ ID NO: 224 - DNA, 300 bp, synthetic construct
  source 1..300: mol_type = other DNA
tttttaccaaccctgaattaccatcagctccctgtgagtttggttagcactatccatggggtccctttgggaagagtggtcccagggggactactgataaaattcaactgaggttctcagtgggcaggcaggctaaagctcaaatcctttgtggtcaagatacaggcacactgtgaggtccggtcccaaacaatctattggcttctccctctttttgacatcctaactgtggcacaaggaatgtcctctttaaatgagtttaaaaggcaattgaaatgaacataaatcaaatgaaatgct

SEQ ID NO: 225 - DNA, 300 bp, synthetic construct
  source 1..300: mol_type = other DNA
atttgtttttttactgagctaattttaatgatttcagcaaaagttattttgttattgagtgatgaaacaaaagatttttgagggtgttcatgagcataagtgtatcatatagtcacttatggttgttgtgttcctagtacttagtacaaggtatcggaattgttctttagttaatcttttatcttgagaagttaaatcttggtgtaatcttatcctcatgttcatataaagatatgtggagtttgtagtgaggacttagagccgggtacaatttcatggttaaattagaaatgcttttgg

SEQ ID NO: 226 - DNA, 300 bp, synthetic construct
  source 1..300: mol_type = other DNA
ccataggcatccatacaacagaaacttcgatggaaaatttcaccattcaagattttaattgaactgatggccaggcccttctccggtggaaaaaaaattagataaaattaaaaatgctttcatttggaggtaagctttaaaaaggggtggaagaaaagggggatcctcaagtttcaggaatgattagaaaattcacaaccagagaacttagcacatgatgacactgcattgaccacacagcctacagagctggaaataagacctacagttctgggaattggggttctaaaaatcacatgg

SEQ ID NO: 227 - DNA, 300 bp, synthetic construct
  source 1..300: mol_type = other DNA
atatattctttttttgagacagtgtctcactctgtcgcccagcctcctgagtagctgagaccacagatgcgcgccaccacacccggctaatttttgtagtttttgtagagacggggtttcaccatgttagccaggctagtcacgaaatcctggactcaagcaacgggggcagatatattcttaattgctgtgtattgagttaatcctctaacactgtggcacttacctaatgagaattataaattcataattctgctaagggactatcctgaggcttaaagcctgaaaaattccctctga

SEQ ID NO: 228 - DNA, 300 bp, synthetic construct
  source 1..300: mol_type = other DNA
acatgcgactcttaatttgggacggacagaacagccgtacagaccagtagttctcagcgcctttgcttaccctgggttgctcagaagacttactggttactggttccttcttcccttttgaaggacttaaaggagaagaaggaagttgtggaagaggcagaaaatggaagagacgcccctgctaacgggaatgctgtgagtgtctgctttgctcctgagccctggcagctaccgccccacaaaatttttcctgttctactttaaacatacctatatatgtgtgtgtatgtgtatatgtat

SEQ ID NO: 229 - DNA, 300 bp, synthetic construct
  source 1..300: mol_type = other DNA
tcttcagtctgtcagccaatcccagagggaatcttttggactcttgtggcttctgggtccacatttatttttgttttggacagaatacactcagaaaaaaagagagacggacttaaaagatgcactgttcaagtaaatgcccagaattcaaatcgacatcaagttggaaaaccgtctcttgttagggacataaatgaaaagtagatgggtctgtatgagcgtgcagggagtttgggaagataaagtttctattatctaaactgataaagcctggtatgtgttttattcaataattagagg

SEQ ID NO: 230 - DNA, 300 bp, synthetic construct
  source 1..300: mol_type = other DNA
ataagacaccactcaaaacaaagcaaacacattataggacaaaagaaaacaattcaagaaacaaggctagaagaacagaacactaccactgtaccagttaaggctcctgaatataaacaacagacatatattctagtgaatctaagtcaaaaaggaatttattggctaggtactagatagttcacaacactaagacaaggttggaaaatccagcttggacaggaatcaaggaaggcaaatcacagaagaatgtttgcctccacagccttgaatgaagactggaacttatgttactgaatc

SEQ ID NO: 231 - DNA, 300 bp, synthetic construct
  source 1..300: mol_type = other DNA
ttataaaaaagaattaacaccaattcttctcaaactttcagaaaattgaagaggaaggaattctttttaactcattccatgagcccagcattacctggataccaaaatcagaaaacacacaacaacaaagaagaaaactataggccaatatccctgatgaatgtagatgtgaaaatcctcaacaaaatactagcaagctgaatcaaacaacatatttttttttttaaaaaaagcaccatgatcaagtgggatttattccagggatgcaaggatggttcacacagaaatcaataaatgtga

SEQ ID NO: 232 - DNA, 300 bp, synthetic construct
  source 1..300: mol_type = other DNA
agagggacatttggataaagtgaagagcagaacctacctattagggaagggaagtggattgggtttcctaccctgtctgtagactccatgaagaaccatgtctctccagccagaaagatattcttgcttaagtagctccttacaacctacttcttcataaattttgtagattctttcttaaaaattgaaatataatttacacaccatagaattcatccttttaaaatatatagctcaggatttgtggtaagttcacaaggttatgcaatctccaccactaattaattcaagaatattttc

SEQ ID NO: 233 - DNA, 300 bp, synthetic construct
  source 1..300: mol_type = other DNA
agctctcatagtgatggtgcataggctagtggtggcccctaagacaccaatgccagtggttcacatctgctagccagctcgtctccagaaaaaagtacagcacagaaaatatcacagttctaattgttccatactcagtaagaaccatactaactacacatattcagatgaaaacagtattagaatacaggtattagacttcagagctttactaagccccattctagaaggttggactaaaatactaaagataaaaggaggaccaaagttaggaaattacaagatatataagaaaaattc

SEQ ID NO: 234 - DNA, 300 bp, synthetic construct
  source 1..300: mol_type = other DNA
tgctggcctaatagaatgagtttgggaagagtccctcctcaattttttgggatggtttctgtaggaatggtaccaactcttctttgtacatctggtaggatttggctgagaatctatcaggtcccaggctttttttggttggtaggctgtttattactgatccaattttggagcttgttgttaagtctgttcagggaatcagtttcttcctggctcagtcttgggagagtgtgtccagtaattcatctgtctcttctaggttttctagtttgtgtgttcgttactcttaacaatagatgg

SEQ ID NO: 235 - DNA, 300 bp, synthetic construct
  source 1..300: mol_type = other DNA
ccttttccttcccattccctcctttggtgcctttctcagagtacatggacttccttctgccagactggggagagaagtctccatccccagctcctagggaccatgcagctgacctgctccaaggcacactggcagccccagcaaaatcctggagccggcaccagggcatgtcccacgagactgttaggagggctgtgcatctttgccccttggttgctcattgagaagcagtatagggcttccatgcctgtttggcctcccctggatccctgtagcagctgttaaaagagaacctttcca

SEQ ID NO: 236 - DNA, 300 bp, synthetic construct
  source 1..300: mol_type = other DNA
ccctgaaacgagtgaccccaaaactgcccagcagcctgagcattcactgtaatccataatagttctttaaaaaaattaaaaataaaaaaaatagagatgtggtctcactatgctgcccaggactcaagcgatcctcctgtctcagttttccaaagtgctgagattataggcatgagccatggcacctggcccataactgttcttaacaaaccacctttggaagaagtcaagtgctctctctccagttccttgagaagcacttagaatgcatagtaaagaccaagttttaagtaagagatc

SEQ ID NO: 237 - DNA, 300 bp, synthetic construct
  source 1..300: mol_type = other DNA
cgggcaacaaagacagagatgaggttacttctcatctcatgcctctcagagatgaggcatgtgttacaaacatcaaacactgagctttgggtagttgctgctgttttttatttgtttttctgtttgttttgtttttaatgtcaggcacagtggttcaagcctatagtccctggaggctggaggctgaggcaggaggatatttgaaatccccgagcccaggaattcgaggctgcagtgagctatgatcataccacagcactcaagcctgagcaatatagtgagaccctgtctctaaaaaat

SEQ ID NO: 238 - DNA, 300 bp, synthetic construct
  source 1..300: mol_type = other DNA
ttttctactgtagatggtttgtagacattattcccacagagtgggcttcaggatattcatttattcaatcaccagataattattgagtgcctactatttgccagactttgtatttgttttatatatatgaataaattcttggtacttgtgaggtgtgtgtgtgtgtgtgtgtgtgtgtttgtgtgtgtgaataaatatgtgagcagacagtagataaataaattatatattatgttactggatagtaagggcaatgcaaaaataagaaaaagggtaagggaaatgagggttaagagtgga

SEQ ID NO: 239 - DNA, 300 bp, synthetic construct
  source 1..300: mol_type = other DNA
agcctagtctccccacgaggaggcggccccgggggtggagtcaaccctggaggccacgctctgtgggaaagcacggggcatgcaaactcgaaatgaaagcccgggaacgccggaacaagcacaggtgtaagatttcccttttaaaacgtggagaataagaaatcagcccgagtgtgtaatggcgtcaatagtggtgtggacgagacaaaggcaatgaggcaaggagcgaggctggggctctcaccgcgactttaatatggatgagagtgggacggtgacggcgggggcgaaagcaacggt

SEQ ID NO: 240 - DNA, 300 bp, synthetic construct
  source 1..300: mol_type = other DNA
ctctgtgtctttgttctcactagaatttgctatttaaaaatttttacattaaagtttaatcatacagtacatagaactctttgaggactagagtctttttttaaattttagggtttgtctttttttttttttttttataaaaaagaaggtacttctcaagtttatgagaaatactgagagagcttttggtgacaatcctacctgaaaattaaatacctacacacactctcctgcacctgccttgatttttcaccatagtattatcagcttttaacatattataaatttaattattacatt

SEQ ID NO: 241 - DNA, 300 bp, synthetic construct
  source 1..300: mol_type = other DNA
tattataatattatacagtactataatattatagtattatatagtagtagatatattagataccatgaggatattatgagtagtgcttatactactgtactgtagtgcttatactcaggactagctacataatttacagggctctgtggtgggggtggggaaagcaaggcatcttgttaaaaaattattaaggatttcatgatgccacagcagagcttttagccaagtgcagggtcattgttaagtgtagggccctgtgtgactgccctgttgtttacatactgtctcaatatataccca

SEQ ID NO: 242 - DNA, 300 bp, synthetic construct
  source 1..300: mol_type = other DNA
cctctggacaatttcttttttgttttgggccatgaaataattcatagattcacaccattgcaaaaaattcttatgcatagtggaaataattgttatgtggcttatgcaattaggaactttagaaagagtgaagtcatgctgatataagaggataagtatttatttgatattaggttcaattgatagtctatcttctttcaatttttaaattttctttttcttttttttctttcttatttggctattgtttctaggttctataatgacttaggcaagtttttaattaaaatattgattatt

SEQ ID NO: 243 - DNA, 300 bp, synthetic construct
  source 1..300: mol_type = other DNA
tgtcttaaaaagaaagaaaaaaaaaaaaaagtctccctactatacccttagatatatgcccttccatagataaacatggttaacaatttcttatgtaaacttccagaaacttcctatgcatattaaagcatatctatattaaaatatgtatcttgtctatcctttaacaaaatagaaatgggggccgttctacatatacatactgttttataccctgctttttggatttactgtcttacagccatctttgtatgctagcacatgtagatgttcttcattctttttaaaaacaatgttgag

SEQ ID NO: 244 - DNA, 300 bp, synthetic construct
  source 1..300: mol_type = other DNA
tgttgcccaggccagtctcgaactcctgagctcaagcaatccacccgcctcggccacccaaagtgttgggattacactgtgcccggccgcctcaggaattctctaagtggagaattagtggtgggaatattacacctgatagctcagaggtctctacattcaaatttgtccaaggtttattactggggtccctggacataatccaaagggttcacagactagttggactggaggaggaatcactatttccactaacctctctctgaaatttagcaagttttctattttaaatatggtaac

SEQ ID NO: 245 - DNA, 300 bp, synthetic construct
  source 1..300: mol_type = other DNA
attaaagtggagaattttcgtaatcagagctttattgaaaagtttagtgtgtataggcattgtagatgtgtctgtggaatttatggactcagttaaaaattgtcacctgataaaaatgaagttaactgtctattcaaatgatgagatttgcatctacagatatattactacctaaaagccgaggttgcatatattgccgatggactcctagaatgagtcaggcatcttttaaatctcagtaaaatgattgttatcttccagatactatctaaaatatcaccaatataagattcctcatca

SEQ ID NO: 246 - DNA, 300 bp, synthetic construct
  source 1..300: mol_type = other DNA
gtttagcttgagtgcatactatgtaaagagggtcttacaaaatgtataccggagccacaggagagcaaaacaattatttaagtgatgacatctggtcaagatggcacaggagttcaggctccaaacacctagcaaaggtagttataatataaaaagggtaaccaaataagtatagttgggctatagtcattctagttacctagaatgtaagttgaaatacaaaggggtaagcaggctcaagctgcaggcctctccagcaggggcaaccagaaactcaggttttttagaataaggggatat

SEQ ID NO: 247 - DNA, 300 bp, synthetic construct
  source 1..300: mol_type = other DNA
attttggcctcatcatcacaattcaactgagacagccagtaggaaaaaaaagtgtagtctgaaacattggaagcaatgagaagtgtacaaagaacatagaatttttaaggatattaatataaataagacctccatttagaaattagaatggctttattaaaggaagcatagaaaagatttccattgaagaatgttaaaatacatatgtgtagtatttatatcattgtcatatttatagtatatatgacttttttttaagatatggaatatgtttctttccttttttaaatctttgtagtt

SEQ ID NO: 248 - DNA, 300 bp, synthetic construct
  source 1..300: mol_type = other DNA
gcatctgaataccctgaagcagaactgctccttggtccgatctcccatacttctttctatttactcagcatattagttcttacatttttgtggggtggactatactctcactttaaccataaggtctggtgtacagtaaataaacacaaaagcatcaactagatgaagtagaaaatgccataacttaagactaaagaattatagtaccactgtaagtgtaggaagcttgcaaaaaggaaaagataaatttattctttgcacagaggcatgtatgtgcaaagatagtaaaactctatggac

SEQ ID NO: 249 - DNA, 300 bp, synthetic construct
  source 1..300: mol_type = other DNA
ggagaatgttttaagagccataaaaaagaacgagatcatgtcctttgcaaggacatgaatggagcaggaggccattagcctcagtgaactaacacaggaacagaaaaccaaacaaccacgtgttctcactaataagtgggagctaaatgatgagaacacacagacacatagaggggaacaacatataccagggcctttcagaaggtggagggtaggaggagggagagtcaggaacagtaactaatgggtactaggtttaatacctagtgattacctgggtgattgcttaatacctgagtg

SEQ ID NO: 250 - DNA, 300 bp, synthetic construct
  source 1..300: mol_type = other DNA
actgtttctacaacaattcacttttatgtgggaagtggtgagtaagtcctgatgaccctgtgttaaatctttaaggccaaatgtcttctttggtcctggcaggaataaacaagtttttcaaaaatggtgtgcaaacacacacacacacatacataattacaaccagcaaatcagattatagaattttctgaacaaattcacctcaaaatatatctatttatatttatatatcaaaattggaatcacaaataaatggggaagggattgcaatttcaataaattcagtgctaggaaaaccta

SEQ ID NO: 251 - DNA, 300 bp, synthetic construct
  source 1..300: mol_type = other DNA
gtgagagggaaccagtgggaggtaattgaatcatggggccaggtctttctcatgctgttctcatgatagcgaataagtctcacgagatctgatggttttaacaagaggagttcccctgcacatactctctctttttgcctgctgtcatccatgtaagatgtgacttgctctccttgccttcagccatgattgtgaggcctccccagccatgtggaactgtaagtccaatagacgtctttcttcagtaaattacccagtctcaggtatgtctttatcagcagcatgaaaatggccaaatac

SEQ ID NO: 252 - DNA, 300 bp, synthetic construct
  source 1..300: mol_type = other DNA
tgttgtcctgttgttctcaccagggacagaagcagctcagaatgctggacttcaaagagctttgttcttgcagtcagggactagaaaccctaagcagtgatccgttagtggacataggaccaaggaaatgtcagtagttgccacacagtgaataacttgactgctgtgtcttaagtttttaactttcatccatgatgttggatatagttatagtgcattcattttcattactatatggtatctcattctatgaatataacagataatttatctattctactttttatagaaactattttg

SEQ ID NO: 253 - DNA, 300 bp, synthetic construct
  source 1..300: mol_type = other DNA
tatatgctgcccaactatcttccgaaaagccttcactacattattataatctcaccaaaagcacatagatgagaatacctattgcctatatttattaacactgaatgttattgatctattgaataaaaagttatcttaatataaaatttcaaaaaaaaaaaaaaaattgaagataagccacagactgaaagaaaatatttgcaaaagacctatctgataaaggattgtgattcaaaatatacaaagaacccttaaagttcaacaagaaaataagccacccgattgaaaaataggcccaaa

SEQ ID NO: 254 - DNA, 300 bp, synthetic construct
  source 1..300: mol_type = other DNA
ctggcccaggtcaaaaatggagatgatcaaatctgctgttctcatcagtaatggaatcacccctgtgcatagccactcactctagcctgagcaacatagcaggaccctgtctcaaaaaaagaaaaaaccaaaaacgaaaacccaaaacaaaaacaaaaaaatgataaagagaaaacattaaaagcatccaaaggagtgggaaaaatacattatatatacaggaatgaagaaaaaatgacagcagattcagaaataatccatgccagaagacattcaatcagcaaagaactgaagaatact

SEQ ID NO: 255 - DNA, 300 bp, synthetic construct
  source 1..300: mol_type = other DNA
tagcacatttgtatcaggctagttgccagtgttcagggtacgcctctccaatccagtccaggtggtcacagtctagagttgttaaattatatgtggttctggcatgtttggtttgacaccagccaaaggttttataaaccctagcattattgacatatagtcttaaaaatattattacctcttggaccttaatgtcttaatctcattgttaggttagtaaaattaatgtgcttctgataatctggtttaagtgtattatgccttttcttgggctatataatttatgaaaactttatttct

SEQ ID NO: 256 - DNA, 300 bp, synthetic construct
  source 1..300: mol_type = other DNA
acatttgagcagagatgtgaagaatggcatttcaggcagaggaaacatgaagtgcaaagatcctgaagctagacatgattagtgagttagagcacaaatgaggccaggctaggggaggaaggcatgagaaggaagcggtaagacatgcagcagtgacaaggcagtggagggtgcagctctaataagaactaataagttctaataagttccactctgagggaggtgagaagagggctttgagtagagctgtgatataatcttgcaagaaaattccaattgttccattgaaaacacagaagc

SEQ ID NO: 257 - DNA, 300 bp, synthetic construct
  source 1..300: mol_type = other DNA
gccaagttgtactatgcctttgttacgaggctacagatctcctcgagactctggtttattttccttttgtcctctaattcttaagtttttttgtgattattccgagctattctagttaagctaagggtaaccaggataaaagtcttggtctgctttggccagattattaaggtgggaatggtgccccctggtgtgcagctacacagaggacctggaggaagaaggagacctgagctccctccctcctctgctgcctcctccatttggaaacagacacaggatggtgatcaaaagcacgtg

SEQ ID NO: 258 - DNA, 300 bp, synthetic construct
  source 1..300: mol_type = other DNA
ttgggaggctgaggaaggagaatcgcttgaacctggggggtggaggttgcagtgagccaagattgcgccattgcactccagcctgggtgacagagcgagactccttcttggaaaacaaaaacaataactgtgtgaggttagtaaattataagaacctaaaagcaatataaatgagatagtacttatcatattgaaatgaataagaaaggaggaattgagggaaagctgaatagctttttttccttctctggagatagatctttataatataactttattatttttcaataagtgagtttc

SEQ ID NO: 259 - DNA, 300 bp, synthetic construct
  source 1..300: mol_type = other DNA
gtttgtatttctgtgagatcgatggtgatatcccctttatcattttttattgcatttgattcttctctcttttcttctttattagtcttgctagtggtctatcaattttgttgatcttttcaaaaaaccagctcctgggttcattgatgttttgaaggtttttttgtgtctctatctccttcagttctgctctgatcttagttatttcttgccttctgctagcttttgaatgtgtttgctcttgcttctgtagttcttttaattgtgatgttagggtgtcaattttagatctttcctgct

SEQ ID NO: 260 - DNA, 300 bp, synthetic construct
  source 1..300: mol_type = other DNA
ggcctctactcttcttgtagtttaagctgcctccatctggttgtgatggcctcccctgatgtgtcagcctctacataaggggtgtacttgtgaagtttcacactagacctatgtgtccaatatcctctcagtctccaagggctcttccatttaacaccttttctccttcaaccttgccatgaacacatcttcaaaatcaggagacacgggccagcatttccctcttcttttctattatgagggaagagagctgaaaagaaaagcatgtcatacatatagcaacagaagtctccagattct

SEQ ID NO: 261 - DNA, 300 bp, synthetic construct
  source 1..300: mol_type = other DNA
tagcacatttgtatcaggctagttgccagtgttcagggtacgcctctccaatccagtccaggtggtcacagtctagagttgttaaattatatgtggttctggcatgtttggtttgacaccagccaaaggttttataaaccctagcattattgacatatagtcttaaaaatattattacctcttggaccttaatgtcttaatctcattgttaggttagtaaaattaatgtgcttctgataatctggcttaagtgtattatgccttttcttaggctatataatttatgaaaactttatttct

SEQ ID NO: 262 - DNA, 300 bp, synthetic construct
  source 1..300: mol_type = other DNA
atgttcacagtaaacacacggttttaggaacttgaagaacgtccatacatagaacccagactcttaactccaacacagatcactaaagctttggactgaaaagcaaggagtgcacaggccgaggcaactctacctgggggaggaacacttccatgaccccaaggccgggtgagcctgttggttctggcattcattggttagtcacctgatgtagatgttctactccagaggtggcaagcgtgtgggacatttgttaacactcccacctccaatacttacaacagacatcaataatggatc

SEQ ID NO: 263 - DNA, 300 bp, synthetic construct
  source 1..300: mol_type = other DNA
aatgaatatataacaaccatagaaaaatgtagaagttttccatgtagaaaacatattctaatcacagaaaaactgtagaagacactgtgattggtcaattcaatatttatcactactttccgttcatttctaaggacactcctgtgttggttggttagctacatgtccagctaaaagtctcaattttgtaggcttcctttcatccagtggtgaccttttgacatagttctggccaatgagaatcttaattttcttgggtgatgctcctaggaaaactgctgttttcagatcaaaagaaac

SEQ ID NO: 264 - DNA, 300 bp, synthetic construct
  source 1..300: mol_type = other DNA
gaacattttttctagtttattatatatttaaatacattatagttttaaaagcaaaatgttataacatgcccagagtggtataagaataaaataacgtttcaatagaaatttcctctctttgaacttcaatttatagacaatacataaagctagaaatatgttgaaactttctaataaaactcaatgaattttctcttttaatcagaattattaaacgaaacaattcaaaataactaacatgttatacaaatataataaattacacagtggatttttaaacttgtacaaatagtttataac

SEQ ID NO: 265 - DNA, 300 bp, synthetic construct
  source 1..300: mol_type = other DNA
cattcatatgtaagtagatatacagttgacctttgaacaatatgggcttgaattgtgtgggtccacttatacacagatttttttcccacctatgctaccccagcacatcaaaaccaacccttcctcttcctactcctcagcctactcagcgtgaagacaaggatgaagacttttatgatgatccattgccacttaatgaatagtaaatatattttctcttccttatgattttcttaattttttttctctagcttactttatggtaagaatatagtgtataacacatataacacaaaatat

SEQ ID NO: 266 - DNA, 300 bp, synthetic construct
  source 1..300: mol_type = other DNA
tgcatacatacttcccatgaactctcttactggaagatattcccagatgcctgctatattctgtgaactctaaccctagaaaaataaaatattttcttttatcatagtttcattttctttatcaaggttaagtttcattcatattttgccatcatactaaaatattcccaacttaagaatgttttttctacacagttcttgtcctcctcccgctcaatagtattatagtttttttacgagataaggtacttgattccattcatttcttaaattttcttttttcaaggaacctcatgtgta

SEQ ID NO: 267 - DNA, 300 bp, synthetic construct
  source 1..300: mol_type = other DNA
tttgcagagtattgaggtggcacagggcatcacacggcaaggagaatgaatgtgctaacatgctagctcagatccctcttcttatatagttaccagtcccattacctgataacccattaatctgtgaatggattaattcattcatgagggcagagcccttatgatccaagtgccgcttaaacaggccacgtctctcaacactatcacattgggaattacatttcaacatgaattttggaaggagcaaacattcaaaccatacaaaatggaaaaataaatcaaaataaaataaacctcctt

SEQ ID NO: 268 - DNA, 300 bp, synthetic construct
  source 1..300: mol_type = other DNA
agttgcaggcacataatatgcactaaaaaatgtcatttcccttactttggtcaaaatccattaacgcattctgtgtaagtgtggagtccttatcatggcattcatgattcactgtaatctcaaaatcagttaccattttggatttactttccttatatgccccctacactccagtgaaatgaaaccgtatccaccatgcagccattgatgcaagcatgtcaagagagggagacttacaagagtaagcagtaaggattctgagaagctgatataccttggtcaaattaaattttatcagga

SEQ ID NO: 269 - DNA, 300 bp, synthetic construct
  source 1..300: mol_type = other DNA
tccgtcctcatcctttttttgctctactaacttgtaactcttgatacataaaggccataacttactgcaattattagagaataccatctcccagatactttcttctgcatgtcacaatagatcatctcttgaagtatgctgttcctctaattaatcttcatattgttttttgtttttttgttcttcaatacttgcttggctccgtggttttattttttcttaatactcatatttgaataatgtgagataatgacactggggtaaatatttttcataggtaagagtcaaaagattgccttt

SEQ ID NO: 270 - DNA, 300 bp, synthetic construct
  source 1..300: mol_type = other DNA
ctctcaaagagtgaggggtgtatactcactgccataaatctaacagtactggtcataatttcaaaggtttcatatatttatctgagatgagtacatagctcaacctctttgtccttactcagcttttttcttcaatttatgtggtacatttcagaaaacactgtacacatgacaagatatcctaccccatatgtctaaaattacatgttaaaataaataaaacaattgcagtgctttgaaaacttgataatctggtgcgtgtccttccaaatttgatttacctaaactagactacatgca

SEQ ID NO: 271 - DNA, 300 bp, synthetic construct
  source 1..300: mol_type = other DNA
actgatacatcttttctcttacatcacaaaatattgtgtctcccctgtcatctctcagatgtatccttccacttgttctccatcctcagagatgctgttccatcaatcattctgtctctcttatatatcgtgtgtatgtatgtatatatatgtgtgtgtgtctgtgtgtgtatgtatatatgtgtgtgtatatatatacacacacatatattttatatatatatcctcaacctttccttcattctgcatgtatctttaaacctttccttcattccatttagtataaaaatttgtttaaag

SEQ ID NO: 272 - DNA, 300 bp, synthetic construct
  source 1..300: mol_type = other DNA
aaagtgggtggggtttgtgttgatgaagtcacagacctatcttcaccgcaaaccttcccagggttcatcccatagctaagaccaaagtgatgcatgtctacccaggggcaggcagaggacatttgcccttttctcattcacctctccccaagaggtgacttaggaacttccctaagaagtttcctagtcaaaacttctttcttggtgacgactggtcactgtttacagccccttgtttctctcctctattggagtggttagtcagtcgcctcaaccctactaataaaaataaaccaggtg

SEQ ID NO: 273 - DNA, 300 bp, synthetic construct
  source 1..300: mol_type = other DNA
gctatccattttgggggcgatatctcttgcctgttctatcattcattacatgcactcagttgaaacaacaattttaggcttctggagcccaggtctcctctatcaggactaattctgagtgccaagatcaatgaccaacatcagaggtagtggagtggttaggtgcatggcctttctgtctggcagattgagtttatgtcttggttatgtcatttcctagctgggtgaccttggtaaagtcacttaacctctctgagtcttcaatcacttgtgaaatgatgataatactactggctacca

SEQ ID NO: 274 - DNA, 300 bp, synthetic construct
  source 1..300: mol_type = other DNA
aataacttatgggaaaagcttttatacttgtcactcactttttaaaatatcccgagacagttcactgttgcagacattgaaattggccatttgtaagataaaaggtatgtttataaaatctctttatataatatatgctatctatgacatgcaaaaaagaaaagtctgggtgctgaggtgctgaatttttcattagaaaaacatttgtataaactactattatataaatataagcatatttattacagcaaacattttaatagcaaacaaaacaattgatcttaaaaatatatgcaatat

SEQ ID NO: 275 - DNA, 300 bp, synthetic construct
  source 1..300: mol_type = other DNA
gctatttgggaggctgaggcacaagaatcgcttgaacccagagagtagaggttgcagtgagccaaggtcacaccactgcactccagcgtgggtgacagagtgagattctgtctgaaaaaaaaaaaaaaaaagatttagtagtatataaaaaaaaatatttaacttccctattaaaataaaaatgctttcaagattgggtaacgaagtaaagttcatcttgggcactgtgactaagaaaggattggaaaaaaagaaggtcatcaaaggtatatcaggcaaatgggaacaaaagaaagcagt

SEQ ID NO: 276 - DNA, 300 bp, synthetic construct
  source 1..300: mol_type = other DNA
gctgcagccctcaccagacagccaaacctgccagcgccttgatcttggactttccagccccgacaactgtgaggaaatacatttctgttcttcttaaattacccagtcttgggtattttattatagcagcacaaatgggccacaatctgccatagtacctgtcatgtaggaagtattctgaaactatttatggagtgggtttcattaaaagttactctaatctttgaaatagaaaaatatcttacttttatgatcaatgttttgttacaaactgtctcaattatagaaacaggcttttgc

SEQ ID NO: 277 - DNA, 300 bp, synthetic construct
  source 1..300: mol_type = other DNA
tgctttcttctactattttggggttttgatttcttacatttggaatttatccaggtgtaaggtgtgaggcacggatccaactttatcttttcaagatggcttcttctgtgttgattcaacaccaccgatcaaataatccactttctctttactcaattgggatggcatctatataatgtattacattcccagatgtgtttcagtttatttctggattctttattttgttccatagacgtgtctgtctgttctgaggcagtaccatactgtttagttactgccattgtagaatatagagtt

SEQ ID NO: 278 - DNA, 300 bp, synthetic construct
  source 1..300: mol_type = other DNA
gtaaatatgagagtatgtgacagagacactctagaaataagcaagtcaaggtttagtggaagtcttgctccatttgggatacttattatcctaagtcaacaactgatggtgccctggagtctctttttatctaagacttcttaaatagatccttctctgctacttagtataagaaaggaagttaaatatgtccaataaaagtatactgtggttttggcatttatttaaatgtataaaaacatgtacacatttatttaaatgtataaaaacatgtacacatttatttaaatgtataaaaac

SEQ ID NO: 279 - DNA, 300 bp, synthetic construct
  source 1..300: mol_type = other DNA
tttgatcttctgtcttgatactaaaactttctgcatattcgtatgttcactggagtaggattttaaatttcccttcagaactttttctttgcattcacaacctggctaactggcataagaggcctagctttaggcctatcttggctttcaacatgcctttctcactaagcttaatcatttctagtttttgatttgaagtaagagacatgtgactcttttcagttgaacacttagagggcattgtagcattattgacctaattttaatagtgtcccaagaaaatgggagacagatggagga

SEQ ID NO: 280 - DNA, 300 bp, synthetic construct
  source 1..300: mol_type = other DNA
gaattctgactctggttagttatgtggccgtggcccagtatgtgattgcatattgatgttgaatgagacacaaatttaaccctcaaggagcttatacttaaacagaaaaggcagagtcaggggttggagagatagtttggcttcaaggaggaagcactatttaagcaaaagcttaaagaacagattaagttttcaggcatagaaggaggtggagtgacataaccagaagccccagctgagtcatacctggaagacagacaaaagtttatatcagatggattgaagggtatgtaggagaag

SEQ ID NO: 281 - DNA, 300 bp, synthetic construct
  source 1..300: mol_type = other DNA
gcggctctagcgcgcgggagctgggcgaggctccgggacgacctcaccaatggagactgcagtatttagcatgccccacccatctgcaaggcattctggatagtgtcaaaacagccggaaatcaagtccgtttatctcaaactttagcattttgggaataaatgatatttgctatgctggttaaattagattttagttaaatttcctgctgaagctctagtacgataagcaacttgacctaagtgtaaagttgagacttccttcaggtttatatagcttgtgcgccgcttgggtacctcg

SEQ ID NO: 282 - DNA, 300 bp, synthetic construct
  source 1..300: mol_type = other DNA
actacagtcaactcttttgagatggagtccagtttcatgcctagactgaaattcaagattcataatgaagaattcacttttatcaagcattgacaggagttagacacatctcaaaccatattttaaaatacagccagattacaatgttacctgattctgagactgcctgtaacttgattcataatagtgacagacagcacttggactaggacactagagctgctgagaaggaaaattgcacccagcttctttgcttcctgcaaagatgcaccaggatcagagaagaaaagaccaagttct

SEQ ID NO: 283 - DNA, 300 bp, synthetic construct
  source 1..300: mol_type = other DNA
ttctgttcaggtttttgacatcatttattgaaaacacttttctgactctatggaattgccttaaaatctttgttgaaaatcaattgactaataagcatgagtctatttcttgaccttttttcctgttgcattggcctgttatacatctctatgttaataaataccacactaactttattgttataatattatactaagtcttgcagccaggtaatagcataagtcctccaaggttttcttcttttttgagattgttttggctattctagatctcttgcaattctatataaattttaaatc

SEQ ID NO: 284 - DNA, 300 bp, synthetic construct
  source 1..300: mol_type = other DNA
aaaagtgctaatataaaatattctctcacaaaaataaaaactaactcaaatggcttttagttcttgtgagctgagataaccttcagtaagtaaagctagtttttaaaaatgttgataaaataaaaacagaaatgtcttcaaaattgtcagcatttacattataagtgtgcatttttaaacctagatttaatatcaaatgagcttgttatctcctagatatatgagatcataaagctataaatcctgtccttggctagttttaaggagcaattcaagcatagttattatgaatgagtcatt

SEQ ID NO: 285 - DNA, 300 bp, synthetic construct
  source 1..300: mol_type = other DNA
catttgggagctgattaggtcataagggcggagtcctcataaatggaattactgtccttagaaaacagaccccagagaaagctctgttttagtctgtgaggacacaaagagaagatagctatgaatcaggaagagggccctcatcagacactgaattgcaggcaccttcctcttggactctctagccgctagattgtgaaaataatcagacgtcttccctaatcaccttaatgtaaacaggtccaattctaattggtcaatattctcagcactttattgctttcaaaatagtataaacga

SEQ ID NO: 286 - DNA, 300 bp, synthetic construct
  source 1..300: mol_type = other DNA
aaagtgtagaaagtacaatcaccctgtttggctgaatcaatcatcattgtagaccatggacagtgcaaaccacaaacaataatttcctgctgctagaacttggctgatgaccgtaacaccttccagtgaaaaataatcattcaccattacaataatcaaataatcatttttaacaccacattctgagaattgtaccctaacaagttctttgagataatcattctaatatttacttcaatttatttataatttaataaacaaaatttattctagttaattgcaactgccaaaacctggcct

SEQ ID NO: 287 - DNA, 300 bp, synthetic construct
  source 1..300: mol_type = other DNA
tctcaacctaaaacttggaagaacctgaagtaaatggtcaagtcaatggatttctttttaatcctacaaaagtgaactcttgcactcagtagaagcccaataaatatttgttgttgaaattacaatatactataccgaaagaagtaacctaacattgtaacagagaacaataggattttgttatctaggtaaggaagttaaacataacagcaggtagcacaaaggaatcagcttagcaataataaatttcagattatgaggaatagaaaacattacaattacatatagaaaatacaaagc

SEQ ID NO: 288 - DNA, 300 bp, synthetic construct
  source 1..300: mol_type = other DNA
ccccggtgtgagagtcttaggtttagggaaaaatattacaagtttatttagttctcttatttaattacttaaaaaaaaagattacatgctaaaatatgttaaataaaaatataaatataaaccaattgatttatctttccataatcttaaaacataactagagtaacaaaatcaagaagtgcaaaaagataagattgataaatgtttagatactaaaacaaccacttcaagtgttataaaagagttatgtagagaattactgaatgtagaggagagcatttacttcaaaaatgttggagc

SEQ ID NO: 289 - DNA, 300 bp, synthetic construct
  source 1..300: mol_type = other DNA
tgagtatctggcagatattttctcaaaaaggaataaaatgagtctgtcacttcaggtaaaacgattttcctgaagtatctgttgccaaatgactaaatttgagcttttaagtaaaaactagtattttgaaaaacttctatctattaccaatgagctttgacagcctcccaatcctcgtggataaagatcctttccgagtataagacaatcaatggattctttttgtaacaagtacaaaaaaaattcactgatatgatttcagattccacattgaaactagactttaaaaaaactaccact

SEQ ID NO: 290 - DNA, 300 bp, synthetic construct
  source 1..300: mol_type = other DNA
gggaggagggtatcatgaggcgtgtcccatatggcctgaactggtttttcaggtttctttgggtcctcttggccaagaggagggtctgttcagtcagttgagtggcttggaattctatttttttggtttataagaccatggtaatttctgtatttagtcagcatttaatcactaaaacttaatcttagtagacattttttaaaatgctgaactaaagtgagattttctcttccttaaaaatctgggatgctcgttcattctctgatcagttcagatgcagtgtatgaagaaccataaagc

SEQ ID NO: 291 - DNA, 300 bp, synthetic construct
  source 1..300: mol_type = other DNA
acttgacattgtcactttcggtgttatcttcattctgttataagagaaaactttcgctaatagttaaatgctgccaggtgtaaattagtgtcatcagttgcttcaaacagaaaataagctcagttaatttcaaaattagttcaaagattttttatctgatttatgaaataaaagaactattttggaaattcattcattcaaaggtacaatataagatattttatgaaatttacttaaaaagttcaagaataaacatcatggtagaacaatatttttcctaaattaagaaaatggtgaagc

SEQ ID NO: 292 - DNA, 300 bp, synthetic construct
  source 1..300: mol_type = other DNA
ttcattgtctcgaattcttaccaaatgattttggagagaattgaattgatagaattgattattagaaaaatgagttgaaaacaaactatttagaacctacctctgttttttatgcataaaaaacagtatcagaatataatgaatataaggctaatgaagaatgcatgtgtaagacttgcttcagcaaagctaaggaatgttaagacaaaatttctcctaccaagtctgaggagcaagagattaaaggatctgaggagcaagagattaaaggatctgaggtgcaagagattaaaggagaga

SEQ ID NO: 293 - DNA, 300 bp, synthetic construct
  source 1..300: mol_type = other DNA
ggatttgggattcaccagggcacaaggcgacgtgcctctctcctcacggaccctaagcgctggtggacaatgcagatgtcaaccgcaaatgatgaggcacttgcaggtagcgttcagcaccaagaaggaaatgaagggtgcgtgtcgctgactgtgactctggtgggggcaacttaaatagggccatgggggagggcctctctgaggaggtgacatttgagctgaggcctcaccagtcagaaggaaaaagctgtaaagggtctgggataaactcaacctgcagacttttaaaataatata

SEQ ID NO: 294 - DNA, 300 bp, synthetic construct
  source 1..300: mol_type = other DNA
gaaatctgtagggcaggcagtgaagatgggaggctggaagcctcaagcataagttgaagctgctgtcacaggcagaatttcttttatcgtcaggaaacttcagctctgctcttcaggcctttcaactgattcagtgaggcccacccagattatttaggataatttcccttacttaaagtcaactgattttgaactttaatcgcatctacagaataccttcaaagtgacacttggattgatgtttgattaaataactgggaattgtagcctagtcatgttgacatatggaaggatcaccat

SEQ ID NO: 295 - DNA, 300 bp, synthetic construct
  source 1..300: mol_type = other DNA
cctatttaatcagaaactctggacttgcagtccagcagtctgatttaacaagccttttgggttctcctaatcccactgatgtttgcaaatgactgacctaggtctttggtccattttaggtttgatttgttggcaagactacttcatagtaatggtgtattcttttaaaaggcatatagtatctgattatcttttattttataaccagccatgctcagcacttagatccatgagggtatagtagaaattgcaaaatggagatagcgtattgtcccttcttcacttattacctgaaacaca

SEQ ID NO: 296 - DNA, 300 bp, synthetic construct
  source 1..300: mol_type = other DNA
ccaaagcagagttcacccccgaccatttcagaaggtatttctgaaaaggagcagatagaacgtaattcggagtcactcacccaggtgagagggttggcctcaggtctaaaggcaggaagcgcttctctgtttataagacctaattttacaaatccattcaaagctttcatatatccctgaaacaagaattaataagcagtatataaaatttttctcttccaatgaaaaaacttaaaatatttttgaaaagagggatatatctttgtaactaatttagaaaactgtttatattgatgatat

SEQ ID NO: 297 - DNA, 300 bp, synthetic construct
  source 1..300: mol_type = other DNA
tcaggccggccatgagaccgggaaacccaaagcgcgtgaggacgcgagcaaactaggccggcgcacgcgagccgaaacgctggctttggtaggacaaccaagctcacacgccgagagattccggaagtgctcgttgcccaaaagagaccggaggaaaacatggtcgggagggggataaaaggttccggaatgaaaaaataatggcgccccggggcgtagcttctggagcggggctccgccccctgccctagcatcgccctcgccacttttgtgtaaacttggcatcaataatttctaccc

SEQ ID NO: 298 - DNA, 300 bp, synthetic construct
  source 1..300: mol_type = other DNA
taaatctaaaggtttgatgaattcaatttaaacctttttggctgcagtatgtcctaggtaatcttgggaactgtacattgcctcacatcagaaggcaagatatttggttaaactaccagaacttgtaagattgatcagagtttggaaaaatttattttggagagcttttttattgttttgtatttgaccattatttccataattgtatttgagaatttttggtaatgacttgtctttgctgtgtttgtaacctgcttgaattttaaaggatgatgcagtaaagagttcagataactctac

SEQ ID NO: 299 - DNA, 300 bp, synthetic construct
  source 1..300: mol_type = other DNA
agtagctgggattacaggtgcctgccaccacaccgggctaattttttatatttttggtagagaaggggtttcaccatgttggccaggctgatctcgaactcctgacctcaagtgatccgctcaccttggcctcccaaagtgctgacattacaggctgacaccatgccccggccccttcttttgaattttgagtgaccacaggcattgatgatagaatgtgaatacatttgatttgtattcatatggagggaaagtgcctctgacctgtccccatggaaggaaaataagattggcctggag

SEQ ID NO: 300 - DNA, 300 bp, synthetic construct
  source 1..300: mol_type = other DNA
tcatagatctaggaagctcagagaacaccaaacagtataaatataaaaatatctacatgtagccatatcgtattcaaactgcagaaaatcaaagacagagaaaagacttcagatagactcatcatcatcatccttcaacagtcactgcatgtgatgttggatgatttcctcttggggttggttggtcaaccataatggatatcatagccacaatcttaccatgccttcttcatctctgactctaaggagtcaccttcctttccactgttgcctggttctgtagtctgtaacagattcata

SEQ ID NO: 301 - DNA, 300 bp, synthetic construct
  source 1..300: mol_type = other DNA
agagtgaggaatataaggaaataccagtaaagaaaacttaggattctaagtgacagcaggtatcttagtaactggttggtgatcacctaatataagataaccacaggtaagatgggtaagacctattttagaaacccataaatttcaggggcaggcaggtagacatactgtcctggtacacatttggaggaaggattatttttctgagcaaagaaaacgatctgttcccctactcatgtgggcttgtattcatgcatatatttacttgttaatccattccttcaataaatgggaattcaa

SEQ ID NO: 302 - DNA, 300 bp, synthetic construct
  source 1..300: mol_type = other DNA
ctgtttatgagttaaactaacattgtagctggttctctgaagaaaaaaatacataatttaaaatacaaaaaccacttcttaacaaaaaagtgacaatgaaatatatagagaacaagaatattaacaaaaataaaacgaacattagagaacacataaacttcatacaaataaatctcaaaacctggatgtaaagaataattttctaaaactcatccagaagagacagaacatttatctctatctaccagcactactaatttttaaactgtactgaaactacaagctaaagtaggtagaaaa

SEQ ID NO: 303 - DNA, 300 bp, synthetic construct
  source 1..300: mol_type = other DNA
aatggaaattatctcaatgtaataaaggccatatatgaaaagcccacagctatcctacttaattgtgaaaaactgaaaggtttcccactgagatcaggcacaaggcagagatgtccactcttacttacttttattcaacatagtactagaagtcctacctaaagcaattaggcaagaaaaagaaataaaacgcattcaaatcggaaaggaagaggtaaaactgtccatttgcataagacataatcttagatataaaaaaccatttaacagttttttaaaactgttagaaccaataaattt

SEQ ID NO: 304 - DNA, 300 bp, synthetic construct
  source 1..300: mol_type = other DNA
ataaaactgaaaagctattaagtggcaaaataggtaaaatttctctgaaatgaaaaaagtgaaatggcaaaaatatagcaggcatccaagcagaacattcatgtcatcaaaaggagaaaaataccaaggtgcccttggatttcttccggcaatattcagtgcttggacttaatagtgaagtgtgttcacaaatctgaggcaaggaaggcatgaaccattaataacactcccagaaaagcataaaggcaacagtcagacacccgaagcatgaatgatttcaaggattaaaaaaccaactag

SEQ ID NO: 305 - DNA, 300 bp, synthetic construct
  source 1..300: mol_type = other DNA
tggctcacgcctgtaatcccagcacttcaggaggccaaggaaggtggatcacaaggtcaggagtttgagaccagcctgaccaacatggtaaaacccgtttctactaaaaatacaaaaattagccaggtgtggtggcacatgcctgtaatcccagctactcaggaggctgaggcaggagaatcacttgaacccaggaggcggaggttgcagtgagctgagattgcatcattcattgcactccagcctgggcaacagagcaagactctgcctaaaaaaaaaaaaaaaaagacagtacatggg

SEQ ID NO: 306 - DNA, 300 bp, synthetic construct
  source 1..300: mol_type = other DNA
aaacttttccaaatttgattaaaaggataacatattctaaaggtattcaatatttttacttatctctgaaaaacttaatcacataaaagcatacattttacacatacagctctctccatcttccacaatagattaagacataaaacataaccagtatttttgaaaagcccccttaactggcatgcttcttactgaaattatcataaaaggttcgtatgagaaaggattccagaatatcccttaattgtgttgtagcttatgcatttctatttattttatacattatttaattcatgtgag

SEQ ID NO: 307 - DNA, 300 bp, synthetic construct
  source 1..300: mol_type = other DNA
aggtcaggagatggagaccatcctggctaacatggtgaaaccctgtctctactaaaaatacaaaaaattagctgggagtggtggcgggcgcctgtagtcccagctactcgggaggctgaggcaggagaatggtgtgaacccgggaggcggagcttgcagtgagccgagatcgtgacactgcactccagcctgggcaacagagtgagactccatttcaaaaaaaaaaaaaatccatatatgtgactgtaatagttctttgttaatatagccataagaaattatttacattaaaacaatcag

SEQ ID NO: 308 - DNA, 300 bp, synthetic construct
  source 1..300: mol_type = other DNA
gatgtaatactgcatctttatgtttgtttccatttcttttgactgcgaatggtgccatgtacagtccgtgtttgtgtgtgtgtaagtttcgttaacttttaactttatatgaaagatttgtgtatattttatggtagtcaatgataaaatagactagtgtctacatacattttatgcattcatgacatacctttttcttaattttgatatttctaggctgcacagttcatctttgaatgttttcaaattattgcaaatctacaaaaagtttttcaatatatgtattgaaaaatatccatg

SEQ ID NO: 309 - DNA, 300 bp, synthetic construct
  source 1..300: mol_type = other DNA
tcccaactaaaaaatgggcaaactatttcaatagaccttactccaaagaaaatatgcagatgatcggggagcatataaaatgatgctcaaaatcattaatcattagagaaatgaaaatcaaattcacaatgagataccactttacactcactaggatggctaacatcaaaaaactggaagataacaagtgttggtgaggatgcagaggaattagaacccttgggcattgctgttaagaatgtaaaatggtattcctgctctggaaattgatatgatagttctttaaaaaattaaatagag

SEQ ID NO: 310 - DNA, 300 bp, synthetic construct
  source 1..300: mol_type = other DNA
ccttccttccttccttccctccctccctctctctctctctctctctttttttggtgcatccatactttctggcactataagatgcttagggcttatcttgtatatttccagccccagttatagaatcagccatttcttcaaggatcccctgtcattttactggagaaaggacttagaatccaagatctgggtgctagatgtgcttgaggtgttgtttcctccagatcttctcaactgacagagcagtgaaatatatgtgtgtagggaggatggggagaacaatttttttaacacatatga

SEQ ID NO: 311 - DNA, 300 bp, synthetic construct
  source 1..300: mol_type = other DNA
taaactcaaacatcgcctagaacttgaaagagctttctaaataattaaatataaaattcaattcaaattatattcagagtattttccatgttaaaatttttgttttttttctagtttatggaattgaataatccaagtaaaattttctgtaatctcttagctactataacattagattaattgaaacagtccattccccaaccatttgggataaactgaaaactgccataacatgatacgccttactattagtacatattcaagagacttaaagcacacaagatttgatcatgttataaa

SEQ ID NO: 312 - DNA, 300 bp, synthetic construct
  source 1..300: mol_type = other DNA
agattttcagatcaatcatattttgttcaatgaaatttgcatatagacaaataaactctcccagaagagttttacttatcaaaaccaacaaactctcctagaagtttatttgttcaaactgcatttttacaaggacacttcctaaaaattgtagtgtggtccaagaggttatgcatatgtaggggtaggaaaaaccgtgacagtcaaaggtaaggttccaaaatacaagtctcctctaaaatgtcaataaacacacaatgaataacacagagggatgacaagccatctgaaactacaaat

SEQ ID NO: 313 - DNA, 300 bp, synthetic construct
  source 1..300: mol_type = other DNA
ggggctcccattggccaaatatggaaaaatttgagaatgaaaataaatattgatagaaactattaccagttgaacaaaataaactatgagtccataatgatataaataaatggaatttgatgagtagcaatatatttacctaatttcaaatactgccttaagaaatgctaacaattttaatgggaaacattagagaaatccaaattgtgagacattctagaaaataaccatcctgaaatcttccagaatgtcaagaaaatgttctcatcacaattgaaggaaaataaagagaaataacta

SEQ ID NO: 314 - DNA, 300 bp, synthetic construct
  source 1..300: mol_type = other DNA
gctgaagtctttttatgggcacaggataggggcggggcaggccaaaaaggcaacatttgggctgaaaaatagggtcagctgttttcacttaggacaaacttaagggtggggcttagccaggatcccagcctttctgtcagtttgaccttaaaacctgcagcacattatatagccttactaggggggatgtgtgtgtgtacacacacttttttttcccacatactattattgaacattttaaagatttgtagttggcagacttttgacactttgagcaagttaataagaaagcatgtttta

SEQ ID NO: 315 - DNA, 300 bp, synthetic construct
  source 1..300: mol_type = other DNA
ggtcaggagtttgagaccagcctggccaacatggtgaaaccccatctctactaaaatacgaaaattagtcaggcgtggtggcaggtgcctgtaatcctagctactcgggaagcttatgcatgagaatcgcttgaatgcaggaggcagaggttgcagtgagctgagatcacaccactgcactccagcctgggtgacagagtgagactgtctcaaacaaacaaacaaacaaacaaaatatatatatatatgaacattacatatatatatttttctttatgggctatgaaagtatcatactgt

SEQ ID NO: 316 - DNA, 300 bp, synthetic construct
  source 1..300: mol_type = other DNA
tagattgtgcagtaagataattgtccatctcctctctgatttacctactataagaaacacccttacactcaacagcccatggtacgctaaaccctcatgaataaaactagggcctgaatacctatggtttactccaactataggggtgggagtaacatgaagggaaaccttccatagctgtccatggatgaaaccagctgaaaagctcccatagaggccagacagggaatttcacaactataatgtgttcttcagaaacatgcatgaggaattctcttgtagtataatttaaattatctc

SEQ ID NO: 317 - DNA, 300 bp, synthetic construct
  source 1..300: mol_type = other DNA
ccagtctactctcactagtagttcacttaggttattattttcccacatccttgcaaatacttggccttatctgattttctaatgcttgtttatctcatggatatctagttgtagtttttgaatttgtttaaatcactcttagctgatttttaatacatttgagcattcttcatatatcctttagccatttaggtttccacttctgcaaattgcctatatacattctttgtctatttttcaattagttttcctgactctttattatcgaatgatttgcatatgttttcttgtacatcctaa

SEQ ID NO: 318 - DNA, 300 bp, synthetic construct
  source 1..300: mol_type = other DNA
aacaaacaaacaaaaaaacaacctgtggttggtcaaacaaattttgaacacccgagtccttatggggttaaagtttctttaccctggcttttcaatgaaggaaaaatatatactgaatatctagtcatatgccaaagcatgctccctatgtttttccatttaatcttaaaaaaagaaagacactgacaataataagtgtcctaatttcataaatgaagaaactgagagtgagcataaatgtaatttaaattggagattctaaggaatcttcgtagcacattattatagatttacttccgt

SEQ ID NO: 319 - DNA, 300 bp, synthetic construct
  source 1..300: mol_type = other DNA
aggcagaggttgcggtgcgccgagatcgcgccactgcactccagcctaggcgacagaggaagactctatctgaaaaagaaaagagaaaaaaaaaaggcatcattttctaggtaccgtgacagggaataggttgggaagcaatgacttcaggacagggggatgttgagtgaatggggctcagccctgtagccagtcaacatacagaggcttaaagcaaatttccaaaaggcatcccttttccttcaagatactaccaccctctattggacaactgccctgttaataactgtacaaatctat

SEQ ID NO: 320 - DNA, 300 bp, synthetic construct
  source 1..300: mol_type = other DNA
aagaggtgggggcagggtgagatccaggttttgccaggcttaaagtttatgcaattttgggatccctctttaagaaacagaatacagaattacaaataattttgaaaattaagtccaaggccttgaaatgtgctggagagtgaccctgaagcttaacttcactagtttcatggtaaatcaactttgggagagaaaaagcttcccaggaaaagggatggcgtgttcagcggggctggagtttggagggatgcacactagaccattagacttgagaatcctgggttctcatgctctggtttc

SEQ ID NO: 321 - DNA, 300 bp, synthetic construct
  source 1..300: mol_type = other DNA
atcacgccagatgcattccagtctgggcgacagagacagattccgtctcaaaaaaattattattattattattgttattattattttcccttgagatggagtcttgctgtcatccaggctggagtgcagtggcgtgatctcgaactcctgatctcaggtgatccagccaccttagcctcccaaagtgctaggattacaggtgtgagccactgcacccggccaaaaaaatatttcttatggcattatctgcaaaagttgaatattggagacaacccaaatgtcaattaataggggactgat

SEQ ID NO: 322 - DNA, 300 bp, synthetic construct
  source 1..300: mol_type = other DNA
tccagtactgcttatccatggataatgaggacctcctgtagctgtagtcactttggtgcatcgtttccaaaaacctaatgagttgtgatgtcaattgcagctgtcaatctacttttaatcacaggcctcaaatgaagaaattcatttagaggataagcaaattacagcttcagttttgttcataaacttaagccccttattgctaatttttttgaaagaacaagtttatgctgatttgtccaaggatactcagcaaatatttggaaaatagttcaaagtttaatgtataatcataatcct

SEQ ID NO: 323 - DNA, 300 bp, synthetic construct
  source 1..300: mol_type = other DNA
ctcataaagttattagtggggaacccatagcagggagaggaacagagagtgtatcagacttcaacatgtatgttgtgactcttgttactttagaagaaaatgaacctcactatgtaataacctaactctgttgtgtttattcattttctttctttttttatttttatgtgtttattcattttcttctaagttcaaaggtcatttctgggtaggagagcaaatgtccttatattttttccaaatagaccatttgcttggtgggcctcaccccggtggaatggaagtacattggcagcaacc

SEQ ID NO: 324 - DNA, 300 bp, synthetic construct
  source 1..300: mol_type = other DNA
tatatatgtatatatgtgtatatatgtatatatgtgtatatatatgtatatatgtatatatatatgtatatatatgcgtatatatatgtgtatatatgtgtatatatatgtatatatgtatatatatatgtatatatatgtgtatatatgtatatatatatgtgtatatatgtatatatatgtgtatatatatgtatatatatatgtgtatatatacatatatatataaaatatagaaagcaacaaaagtgagatacagttcttcctcttccctttctttttcttaaaagaaaatctttt

SEQ ID NO: 325 - DNA, 300 bp, synthetic construct
  source 1..300: mol_type = other DNA
aatcatacctaataaagtttttatcagtgtgttagatggccttcaaaatatggcagagaaatccataaccaggcaaaataattttgggtctcatttcttcttataagttattacttgcctataacaaactaatctaaaatatgcctttctgctctaaaagctaaagcttaagagtcccttggcagatgggacttttaaattattcctgtagaaaattggtagtatataagtgttttaatttattatgtgttttaatttattcctgtagaaaattattcctgtagaaaatcggtagtatat

SEQ ID NO: 326 - DNA, 300 bp, synthetic construct
  source 1..300: mol_type = other DNA
gtaatcccagcactttgggaggccgaggcgggcggatcacgaggtcaggagatcgagaccatcttggctaacatggtgaaaccccgtctctactaaaaatacaaaaaattagctgggtgtggtggcgggcgcctgtagtcccagctactcgggaggctgaggcaggcgactggcctgaacccgggaggcggagcttgcagtgagctgagatcaggccactgcactccagcctgggtaacagagcgagactccgtctcaataaaaaaacaacaacaacaaaaacaaaacaaaacaaaaaaa

SEQ ID NO: 327 - DNA, 300 bp, synthetic construct
  source 1..300: mol_type = other DNA
tggccagtattctgcctagccacatcaacaaatgtctcagattcctcaaaagattttgacatcaccaagaggggcttggagtatgtagatgaacacaatgccttctggttggtcttgttcatattgtacatacatttcttaggattttgcaaatattctagtatccaaaatgttattatctggctcttaaaatttgaagtctttatgtcacaagtgacaggctagagcttgtgcaaagtgaatgaccctatgtgtaaagtgtttggaatcaagggtgagatgccaggccacaataaactc

SEQ ID NO: 328 - DNA, 300 bp, synthetic construct
  source 1..300: mol_type = other DNA
ttcagtttctgccagcatcgtctgcattcaaaccaatgacctcgaggtgaaaatctccagataacatgattggtccccatgctctcatgatttccttacttaagcaattaaaggccaaagcaagatgcttagtaactccttttccacatagaggcacaaataaaggaaagctggtcacaagttttgaaccaaagagttaaaagaagaatcataacttgtctctatttaatgattggaaactctcacagacttctgtgaagtctctcccccttttgtacctttcttacaagtgatgactat

SEQ ID NO: 329 - DNA, 300 bp, synthetic construct
  source 1..300: mol_type = other DNA
cctgagattttaggagcttttgtagaatttctgaatttgtagctggtgactgagtagaggagctaagttccactccagagctccagagtgaaaggtgtgccttaaagaggggaaaggggaatcaattttcccctgaagccccagtacaggcttgttgtgaggatcaaaagagcaggagggtatgtcctgaggtccccagatgcatgtgtgatgctgctactacaggggtcagctgtgcagagcacccccacccccaccatttccattcacaccctttgggttctatagagttccactcct

SEQ ID NO: 330 - DNA, 300 bp, synthetic construct
  source 1..300: mol_type = other DNA
ccctggaaattagcgccttgaataggcacccctagcagaagagacaacaggccgcctatagtaaactcagagccccaaatcatgtgaagcaagcatcagcctgagggtctgtgaatcccagttctagatcccagttcattaaggattttctttctggctttgcagggaaggagtgtggtttccaggaaagtccctgatatctggagaagaaggctccatgttggccccagaatggcatactcttggctccaaagacattaagtcttcatcttcccacactaagaaacaggaaaattttta

SEQ ID NO: 331 - DNA, 300 bp, synthetic construct
  source 1..300: mol_type = other DNA
tgagctgtgatcgtactgctgcactgcagcctgggcaacagagcaagatcccagctctcaaaaaaaaagtaacagaagaaacctacggactctgactcagagttgttgctcattcagccctggtcatggattgaacagtgtcccctgcctctcctgagaaaaaaagagtcctcttctccagtacctgtgaatgtggccttatttggaaatagggttctcgcagttgatcaagctaagatgaggtcattagggtgggccctaatccaaagtaattgtgttcttataataaggacaaattat

SEQ ID NO: 332 - DNA, 300 bp, synthetic construct
  source 1..300: mol_type = other DNA
aggagtgcttgggtctgggaggttgaggctgtagtgaaccataatagagccaatgcactccagcctcggtgacagtgcaggatcctatctcaaaaaaaaaaaaaaaaaaaaaaaattttcatcaattagagaaaagtttctgggatttaatttattctgttaagatgctctcctcctcctggaaagaaagagataaaaacaagtctgggaaaatgctgattgttaaagttgggatataagtacatgagagttcattataccattctttccagacttggatgagtataaacatttttaaca

SEQ ID NO: 333 - DNA, 300 bp, synthetic construct
  source 1..300: mol_type = other DNA
gaaagcaaccattcattcattcatttagattaaaaaaataaatagagacaaagtctcaccatgttgcccaggctggtctccaactcctgacatccagcaattctcctgccttggcctcccaaagtgctgggaatacaagtgtgagccaccatacccagccaacaattctttagtttaaaatgttaaactgaataaagtccttagtcatctttcccctaagattttaattaaatttattcagaaaaacttaattatagaaaccaaagctctaagagattatggctgtcaaaaacaaattct

SEQ ID NO: 334 - DNA, 300 bp, synthetic construct
  source 1..300: mol_type = other DNA
atccaagcagcatgaaactgcactcctagttaggtttgtggattataaatgctcataaattccttatcccgtccctcatggaaaggtggggtttacttctccacccccttaattctggacttggcctatgacttgctttgaaccagtagaatatggtggaaatgaagctgtgcccaattctgggcttaccctttaaaacagaactggcagcttctgttttcttctcttggaattcagccaccatgctgtgaggaagcccaagcagtcctgtggggaggcccatgtagaggagaatcaaag

SEQ ID NO: 335 - DNA, 300 bp, synthetic construct
  source 1..300: mol_type = other DNA
aatacaaaaaattagcagggtgtggtggtgcgtgcctgtagtcccagctatttgggaggctgaggcaggagaatcacttgaacctgggaggcggaggtttcagtgagctaagatcacaccactgcactccagcctgttgacagagtgagactctgtctcaaaaaacaaaataaaacaacaacaaaaaaacgagatgatgtgaacggacaccataccaaggaaggtatatagatgataagttagcaaataaaatatgctcaatgtcattggtcattagagaaatgcaaatttaaaccacaa

SEQ ID NO: 336 - DNA, 300 bp, synthetic construct
  source 1..300: mol_type = other DNA
ttgcagagccctgggtggggcctgtgactctgagatctccaggagcttgacaagctgggaagagatgagaagtcattggctggcgaggaagggcagggggacgaggtagtgacaacagtcaaatgggctccagccagaggcagtgaatacaccagtgctgaggatctgtgctaggaacagcaaacagataccaaggttggggagagggatctaagtcactgagaaaagaatgaggcctggtagtgaggagcttggttcaggcatcctctttgcatgaagtcagaactgaaacctaggcgt

SEQ ID NO: 337 - DNA, 300 bp, synthetic construct
  source 1..300: mol_type = other DNA
caagaagacatgacacctgtggccttcacacagcaggtcccacctgctcggtgacacacagtcatttcagggtccacagcgtcccactgtcccatgtcactgggtgtcacagggccacacacacagtgatctctcactgtcaccctcacttggagtctcccatatcttcagtgttgcacccatgttcccaaagccaccatgtcaccctcacacagcatcagacacagttccacactggctctgtgtcactgttacatttcagcatcatccaggacctcctagccttaaaaaacaaaaatc

SEQ ID NO: 338 - DNA, 300 bp, synthetic construct
  source 1..300: mol_type = other DNA
attctcaaatagcattttatactatttcttaattttttattaaacaatatctgacttcctactatggaagatgaagatgtagctccccaacagcttattccactatcacaaaacacacccacctacacgtgttgcttccccaatattcacaatagcgttgcatcacaatatttagtgttctcatttctatgcctatttaaatattatttatagttgagccatgtagaacaacgtgattatatttgtaccatatgttgttctccctggagttaataattgcctcacagaatgtacataaat

SEQ ID NO: 339 - DNA, 300 bp, synthetic construct
  source 1..300: mol_type = other DNA
atttaatctgactgaatactaatctgtccaagacttccaccagcagttcatttttccaccagcttctcatatttccactttaccaccaaacctgacattatccaaggtctaaatgttgccagtgtggtacatgtagtgatagcaacagtgtagtgtgtgtgtgtgtgtgtgtgtgtgtgttttagtgtaatagtgtagtgatagtgtagtggtttattttacattataatactaataaatggaagcatgtcttcatatgcatgttaaccctatggagtttctcttcaaaatacctcttca

SEQ ID NO: 340 - DNA, 300 bp, synthetic construct
  source 1..300: mol_type = other DNA
aaatctttattaaggaaggcctaacagctgtatcagataagtttgctttttcttggaaactttggtaaaaaaaaaaaatcacctgggaaataatgtgattagagatgcttcttaaatgtgcatatgtgtttagtctgttctacaaagatattattttctttgtagcattgttttattgaacaaattttgttaaattttctattaaaatagtcttatagtgatttaataacaatttggaaaagtcgcaatctttataagcatatgtgtaagtgagatggattactattaaaatgcaatttc

SEQ ID NO: 341 - DNA, 300 bp, synthetic construct
  source 1..300: mol_type = other DNA
cagatttagggtgagccgagtgaggcagggtcatgtgaatgcagggtaaaatcctctatctttatttatattgttgatattttgttcatcatggatagttgtgtgaatttctacttttaaaatattgcataaaggtattattcatcttgatttccaaagtcttggtgcctccttaagttttgcacctggagcacgtgcctcactcacttcattctcatccaccactcagctatacagttggaaaagcatgtgatgatatggacagcacctagtataaagagaagcttgaaagaattttga

SEQ ID NO: 342 - DNA, 300 bp, synthetic construct
  source 1..300: mol_type = other DNA
ggctcatgcctgtaatcccagcactttgggaggctgaggcaggtggatcacgaggtaaggagatgaagaccatcctagctaacacggtgaaaccccgtctctactaaaaaaaaaaaaagttatacaaaaaattagccgggcgtggtggccgacgctgtagtcccagctacacgggaggctgaggcaggagaagggcgtgaacctgggaggcggagcttgcagtgagctgagatagtgccactgcactccagcctgggagagacgccgtctcaaaaaaaaaaaaaaagatttatagagcta

SEQ ID NO: 343 - DNA, 300 bp, synthetic construct
  source 1..300: mol_type = other DNA
acgagagatgaatttctgggcctcagcctgccatttacttgattcatgactgggcaaatctcagctttttcaaaaccttaaatttcttctttattaaatgaaggattagtctaaatgaccttcaaggtccatctcagctgcaaaatgctagaattctatgaccatgcatttctagttatttaaattattatagaaaaatacatttgaagcatgtaagattatcgcaacctgtagctttcataattgtcactaaggaaagccataggattctcagctaatgataaaatgatcgaggtaaaa

SEQ ID NO: 344 - DNA, 300 bp, synthetic construct
  source 1..300: mol_type = other DNA
agttttaatgaagaaggaaatcctgccatttgtgacagcataggtgaacctggaggacataatgctaagtgaaatagatcatataaagtacacatactacatgataccacttatgtaattaatctaaaatagtcaaacacataaaagccaaaagtggaatagtgtttccagggactggaagggagaggagaacagggaggtattagtgaaaatgtacaaaatttcagttacacaagatgaataaaaagtcctagaaattgactctatagtataatgcctatagttaagaatcttgtatta

SEQ ID NO: 345 - DNA, 300 bp, synthetic construct
  source 1..300: mol_type = other DNA
aggtgtcatggctgacacctgtaattccagcactttaggaggctgaggtgggtagatcacttgaggccaggagtttgagaccagcctggccaacatggtgaaaccccatctctactaaaaatattttaaaaattagttgggcgttgtggtgtgcacctgtaatgccagctattggggaggctttaggtgggaggatagtctgagccattggagatcaaggctgcagtgagtcgtgatctgattgcatgactgctctccagcctgggtgacagagcaagactgtctcaaaaaaaaaaaaaa

SEQ ID NO: 346 - DNA, 300 bp, synthetic construct
  source 1..300: mol_type = other DNA
cccatgccttaaatatgcttcttatcctctcacagtcaaaaaggatttttaccttggtacagtctgattcctgcaacacctctctagttattgaatgtatagtagtttgctatagacagactactttgcagtggctatcaaacctttctgagactcattctaagaaatacatttacattgtgacttagtatatgcacacataaaaagaagaaagtttcacaaaatagtttccttactagcaatgagctgttttttgttttatttcgttaacaacaacaacaacaacaacaaaaactgcta

SEQ ID NO: 347 - DNA, 300 bp, synthetic construct
  source 1..300: mol_type = other DNA
ctctgggcctttactgccgaatccaggtctccgggcttaacaacaacgaaggggctgtgactggctgctttctcaaccaatcagcaccgaactcatttgcatgggctgagaacaaatgttcgcgaactctagaaatgaatgacttaagtaagttccttagaatattatttttcctactgaaagttaccacatgcgtcgttgtttatacagtaataggaacaagaaaaaagtcacctaagctcaccctcatcaattgtggagttcctttatatcccatcttctctccaaacacatacgcag

SEQ ID NO: 348 - DNA, 300 bp, synthetic construct
  source 1..300: mol_type = other DNA
atgaagcactctaagaaaattcagctgggcaggtattttaaggtcactgactgactccaaagtgaaggtagaacccatattgaccgcaattcatcacacttctgtaacttcagaactcactgctgactggtggagaaggttgcaattgcattcagtccgaatctctgaacatattatttagaaatattagcttatccagctgcctacggagcttcccatctgggctttcagttgctacattctctaaagccgtatctgacccacaccttactaacactatgtgcttctacagcattcacc

SEQ ID NO: 349 - DNA, 300 bp, synthetic construct
  source 1..300: mol_type = other DNA
gggaaaagactccccagtcaataaatggtgctgggaaaactggctagccatatgcagaagattgaagctggaccccttccttacactgtatacaaaatcaactcaagagggttaaggacttaaatgtaaaacctaaaactgtaaaaaccctgggagacaacctaggcaataccatcctggacataggaacgggcaaagatttcataacaaaaatgccaaaagcaattgtaagaaaagcgaaaattgaaaaatgggatctaatcaaacttaagagcttctgttacagcaaaggaaactacc

SEQ ID NO: 350 - DNA, 300 bp, synthetic construct
  source 1..300: mol_type = other DNA
acgcttcaaggctgccaaatatcacaatttatgtaactgcagtaagagtagcatatatttccatagcacttatgtgccaatcatattctgagcactttatgtttattaacttatttagccctctcgacaacctacgaggtagaactattatttctattttacaaaataggaactaggcacagatagggtaagacagtagttcaagatcacagccactgaacagcagaaccaggatttgaacccaggcaatctgtgttcttcgggctctgtgttctcaaccattattaaacagtcttatta

SEQ ID NO: 351 - DNA, 300 bp, synthetic construct
  source 1..300: mol_type = other DNA
gacgatgaaatacaaggttaattttcttgaccaaccatatctagtaaatggcagagctctaatttaaacctggagctccagctgtacagtcttaaaaaatacttcaaatattttattgattctccagaatgtgtctgtttttgtttgtataactggagaacattccaaagcatttcattaattttttaaaagaaaatattagctgaacattaacatcagtgatctttaaaagaaagaataatgtatgagtttaggaattagttattttaataatagagtaggagtccaaatttgctttaa

SEQ ID NO: 352 - DNA, 300 bp, synthetic construct
  source 1..300: mol_type = other DNA
gctgggcgcagtggctcatgtctatagtcctagcactttgggaggctgaggcaggaggatcacgagtacaagagatccagaccatcgtggccaacaaggtgaaaccccgtctctagtaaaaatacaaaaattagctgagcgtggtggcatgtgcctgtagtcccagctactcgggaggctgaggcaggagaattgcttgaacccgggaggcagaggttgcagtgagccaagattgcgccactgcactccagtctggcaacagagagaggctccgtccaaaaaaaaaaaaaaaagtctggt

SEQ ID NO: 353 - DNA, 300 bp, synthetic construct
  source 1..300: mol_type = other DNA
agcttaaagatgtggtagcagctgcagaccagtacagcgtcctacagacgcccacaaaggcctgcatgtagggcatcagggcattcccaaatgaaccatgacgtgcagagtggcaccgagttcgggaaaaccaagaaccgagtgttgggttccgatctgccagggttataatatcctctggcaaatggcccagatgcaatctgtacaaaatggaattaagacgaagccctccctgctgaatgcctgagaggaaccaaaacatcacttccatttttatttcagggcaaaaactatattaga

SEQ ID NO: 354 - DNA, 300 bp, synthetic construct
  source 1..300: mol_type = other DNA
gccaaggcaggaggatcacttgaggccaggagtttgagaccagcctgggcaatattgtgagactgtgtctctccaaaatattttttaagaaattggccaagcatagtggcatgtggccaagctgctctggaggctgaggcaggaggatcacttgaccctaggagttcaagggtgcagtaagccaaggtcacaccactgcactccagcctggatgacagagtgaaaccctgtctcaaataaataaaatacatatttatccttaaaatcacatagtgcaattgtatttacaaacaaaagtcc

SEQ ID NO: 355 - DNA, 300 bp, synthetic construct
  source 1..300: mol_type = other DNA
aaggcatggcagagagaggccacccatccagggccacacagctggtcatctgcagaagcagggtctgtgcccacgtagaccacctgttgtgacctcttcctttctatagctaaatccattcgtcttctcaacaggtatgaaatacatccttatttttgcatgaagaaaccaaggctcagagaggcttatgggtggcccagataattgtgaattagcacattgggatccagctccatttcacttttgaaacccaacttctttacaatatgctgttctgcctccctgtaaggtctgagaatt

SEQ ID NO: 356 - DNA, 300 bp, synthetic construct
  source 1..300: mol_type = other DNA
ctcccaaattgctgggattacaggcatgagccaccgcacccggcccactttcaccagttctgttcatcattgaactggaagattctatctttggcagtttgcaaaacaaataaacttaaaactggagttaaagacatccagattagaaaggaacagtttaaaccatcttttttcagatgacatgatcttgtacatagaaaatcctaaggaatcaactttaaaactgttagaataaatgaggttgtagagtaaaaaaaaatcaatatacaaaaatcaatagtgtagtgcagaaatatatta

SEQ ID NO: 357 - DNA, 300 bp, synthetic construct
  source 1..300: mol_type = other DNA
gagcatcctcggaaacacctggaaacttcaacatacaaaaagcccaggcgccaccctggaccaaatgcatcagaatctgcatttttacaagatccccaggtgactcatatgcacatgaatgtttgagaaacattgctgcagacaatggggagccattggaggtccctgggtgagaggagtaatctcttcttaaatgtgcttgggaaatgcaactttaggaagcacagtagagggcacacagaatgaccaaatgaatgaacagttattcaaccaacaaagtcttttgaaaatatgaatgtt

SEQ ID NO: 358 - DNA, 300 bp, synthetic construct
  source 1..300: mol_type = other DNA
caggcatcagttacataacttgtatgacagggaacagtcttgacttgggtatttccaaataagccaagttttacacacaaaatgaagtatatttagtggattgatgattgaatagggaagtactactgagaaatcatcacctaggggaacctcatcttttcaatgtgtgggataaagattcccagagggtataggattgatattgttgatgaaaggatgagagagaggaaggctgtgagttacaacaaaattccagggaagttagaacaactttaaaaagacttaaaaatagaagaaatg

SEQ ID NO: 359 - DNA, 300 bp, synthetic construct
  source 1..300: mol_type = other DNA
taatcttttaaattcactcaatagtatattattgagatctttccatgtcaatacctgatgtcatttataatgacggtaggatagttttcctttataagtatgtacctttatttagccaagattgacttttaagatgtttccatatttcattactataaatagtatttagaaaacttcatcctaattgtgatttgtttaccactgcagccagatataaaatacgttttcttagctgggagactcacttttgcatagaggtataagtataagtatatttttaggtgaagttcacataagtta

SEQ ID NO: 360 - DNA, 300 bp, synthetic construct
  source 1..300: mol_type = other DNA
cttgatttttatctagagtctatataggacaaaccatataaaactatcattggaaaccatctacatattttgttcaatgtcccttacacataattttttcctttgaaaaagtaatccacatcttttacaagattataggagttataaaatccattctgtttaccttgttactggctatcaggaatttctgtgtgggtttaatcacagttaatatatttgctcctgtaatcatatattttcgacttccaaaaaaaaaaaagcattttttttctctattctaaacggttttttgaaaaaaaa

SEQ ID NO: 361 - DNA, 300 bp, synthetic construct
  source 1..300: mol_type = other DNA
ccacgccgtcggtaggtccccggtccgggagcgggagagaccggagcgccggggacgaccccggcaagggcgtggcgtatgcagatgagcacggcgcgcggaggctgccggtcacgctcggcctgggaccccatgtcccgcgcgcgatatccgagtgctgtcggggtgtcttcccctagcggcaacggtggagcgagggggctggagagggtgagggggctggggccgcacgagagaagtgaccgtgtgttgagagtgtggtgggcgcgagggtatgagaggaagccgcacggccagtcc

SEQ ID NO: 362 - DNA, 300 bp, synthetic construct
  source 1..300: mol_type = other DNA
gcaagtcatttggcctctatgaggccagttcctgcaattttaaaataaaatcagtagatttcactttacaaagaggttgcagtaatcaacatagataatgtatatagaaagtgtcttgtaaactgatcgttactgtatataaggttattattactatgacttctttttccaagcattgcaaaaatcgtagaagacatttttgttggtatctatagttataaatatgtatatatagtatattgattagattattctaaaatcttattcaagtctactaatttgatgttacttaaatcttaa

SEQ ID NO: 363 - DNA, 300 bp, synthetic construct
  source 1..300: mol_type = other DNA
ataaggaggtgcttttttaaaattgttcatagacttctgtaaaatgcaagataaattaaagttattataacagtgaaaaaaatctgattgatgcctttttccccccaacaatgattggaaatatagatgtcgtactggttcgaaatattttttttttaagttctcaggtcttgaaatctccaatcccatctgcacattcaccatttagacatcttggtaagtgttgacttgcccctaatattttgatgtttatagtaatgaatatactagtgtaaattctcaatcagaatggaatattct

SEQ ID NO: 364 - DNA, 300 bp, synthetic construct
  source 1..300: mol_type = other DNA
atatgatccttaccttaaagacactggcgatttcatgggcacagaaacaaacatgtgtgaagtactgggatagcttaggaagccgatcccccacgtgtcccatttaccagagtgaatcagagtgcaggtgatgcggaatattatcttccatgctattcctgaaatatttccatctgtccctgcctctctgttaccactgaaatgttcctttttttaattccttatcatcttttcacctattaaagtagcctcttaagtggtctccagaagagaagctccagatctactgcaggctactcc

SEQ ID NO: 365 - DNA, 300 bp, synthetic construct
  source 1..300: mol_type = other DNA
tcagataaaagcatttattttcaaacaatactcactaaaacttttgtacttttaaatatttactccaagccttctgcaaataaagaagtattttccctcagtaaatcaaattctctgttgagtttctgaattgctttcattacttatacatattagaatttcattccaggatttcattgtgaaaaaattattgaaaagtatttgaaaattgttctattaaaacaaagatgcatgtgatagtagaaaaaaagcatacattcatttgcttttacaggtcaatgaaaatttgaaagaaatttt

SEQ ID NO: 366 - DNA, 300 bp, synthetic construct
  source 1..300: mol_type = other DNA
accgtcgcccaggctggagtgcagtagcgtgacctcagctcactgcaacctccgcctcccaggttcaagggattctcctgcctcagtctcctgagcagctgggattacaggcgtgcgccaccacactcggctcatttttgtatttttagtagagacggggtttcaccatgttggctaggctggtttcaaactcctgacctcaagtgatccacccaccttggcctcccaaagtgctgggattataggcgtgagccactgtgcccagcccagttgtattctttatgatggtcaaaatttcca

SEQ ID NO: 367 - DNA, 300 bp, synthetic construct
  source 1..300: mol_type = other DNA
cttacatacaactgagtttttgcttacacattctttaatttcttttaattcctatttcagtctgactgaaattagaggagctacctggctgcatacattactgattccccgccaacgtgtttctatgttctttgaaagacaatgtaattgtgccttacttgaagtaaattgatgtgatctccacagtcatcccataaaatattcactatcattatcactatcattataatctggctcaaaggccagattaagatggtcaaataaattagtttgttaaaccaatttaaaacacacagtctt

SEQ ID NO: 368 - DNA, 300 bp, synthetic construct
  source 1..300: mol_type = other DNA
tctccactgtccctgtcaaactcccagcaaatgtgcacagggagggtggggatggctccatcttccagggtgactgtgggtgagcatcctacagctcagaggctgcatcctgcagggcgaatccacccatttccctggcttctccaaacacctcagcctcttggtcttctaccctttgccctctgcaagagagggaggaaggtgtggtcagcatggactttacccctgaagggctattgctttaaggagtgttgaggattgggaagacatctgttaagccagcttggcaaattccctgtc

SEQ ID NO: 369 - DNA, 300 bp, synthetic construct
  source 1..300: mol_type = other DNA
tgcagtaatagagcatggatctgaagaggtgtgattcattttccttaggtgtctgcctctgcttttcatttaaaaaaaaaaaaactcagcttctatttctaacacaaactttcacctcctatggcttaaatagatgtcataaaaatttaggatttatatagggaatgtacacacttaagtcagcaaaaactaaattaattttgccctatattgtgctggtgaaccatgatataccttataatcttgtcaaaaagaaaagttgtagctgtgttcacaggaaaaaaaaaaaaagaaaaacac

SEQ ID NO: 370 - DNA, 300 bp, synthetic construct
  source 1..300: mol_type = other DNA
ggtcaggagttttgagaccagcctggccaacatggtgaaacccagtctctactaaaaatacaaattagccgggtgtggtggcacatgcctgtaatcccaactacttgggaggctgaggcaggagaatcgcttgaacccaggaagcggatgttgcagtgagccgacaccacaacactgcactccagcctggacaacaagagcgaaactcagtctgaaaaaaaaaaaaaaaaaactttacagaaaatttcaaacatacacaaaagtagagagagcctctcacccagactaaaaatgatcagc

SEQ ID NO: 371 - DNA, 300 bp, synthetic construct
  source 1..300: mol_type = other DNA
tggctgacctgtctgtcctcccatccagccagagggacacaaagacctctttgtctctccacccttccgcccagagcctccccagccagtgcagctctgagcgtgtcccccagggagggagacagcccctggtggggactggcagtcctggcagctgccctgaggcacaggccctgggggactcggtgctttgagggcaggggcaggtgatggagatcggctggggaaagggaggccgagaaggcggcagtgtggagcgtgtgaatttgttcatgaacttagctacaaaaatgtcttttc

SEQ ID NO: 372 - DNA, 300 bp, synthetic construct
  source 1..300: mol_type = other DNA
gctcgtgcctgtaatctcagcacgttggaaggccgaggcaggtggatcatctgaggtcaggaattcaagaccagcctggccaacgtggtgaaacaccgtctctactgaaaatacaaaaattagccgggcgtggtggcgcatgcctgtaatcccagctactcgggaggctgaggcaggagaattgcttgaacctggtaggcggaggctgcagtgagccaagatcgcgccactgcactccagcctgggcaacaatgcgagactctttctcaaaaaaaaaaaaaaaaaaaaatttttttttgt

SEQ ID NO: 373 - DNA, 300 bp, synthetic construct
  source 1..300: mol_type = other DNA
aaggagtcttaagaagctgacattttaaaaacaaaaaaaaagttgttattatagtattgtgacattctgcataatttcctaatgaagaccagcattcatagtgctgaggaacagacttttccaggcattttactgaataagctgtaaaatgctgcctttgactttgctggtggcctgcttggcatagcttctctaggtctctgcttaacgttcccagacagcacagcacttcgaaacactctccccactgaatacaactaacaagttcttgataaatctctactatcaaaacttatttgg

SEQ ID NO: 374 - DNA, 300 bp, synthetic construct
  source 1..300: mol_type = other DNA
gaatcttgctctattgctcaggctggagtgcagtggcgagatctcagctcactgcaacgcctgcctcccaggttcaagcaattctcctgtctcagcctcccgagtagctgggactaaaggtgcgcgacaccatgccggctaattttttgtatttttagtagagatggtgtttcaccatgttggtcaggctggtctcaaactccagacctcaggtgatctgcccacctctgcctcccaaaatgctgggattgcaggagtgagccactgcgcccagtccatagttaatttataaattgttta

SEQ ID NO: 375 - DNA, 300 bp, synthetic construct
  source 1..300: mol_type = other DNA
gcagcaaggcctccacttcaccccctaaaggttgccccaagagcaccgtgtgactgctaaggtatttccggagtctaaagacgattattcaggtctcatttgcatacccataatacactgcaaacagtatttttttcggaaaaacatttatatattgcttgacatttttaagtatgagaattttgcatgcagaatttttttgtataaactttctcaggtagtaacccttgggattagtagacaccatcagtgtactaggaattgcagttacccgaaaattgagttacagaagtaactggt

SEQ ID NO: 376 - DNA, 300 bp, synthetic construct
  source 1..300: mol_type = other DNA
gccagccagtcttcggcttcgccccctaacggtgacataaggcactctgtgaaatgctctgttccggaatcaaaagattgatccgattatttgcatacccataatgcactgctcacagtacaaatttaaaaaggcaaaatcaaacatttttattctaagcatattctgtgaaagttagacttttgtttaaacaatactcttaaaatttttttctaggtatagaaccttggcattcactagtcaccatcactatactaggagtttctgttacccgagaaacgagttatgaaattaacaagc

SEQ ID NO: 377 - DNA, 300 bp, synthetic construct
  source 1..300: mol_type = other DNA
tgcatcattaatgacccaaagacattctctttaaaaaaaaaaaattaccactgtcacactcttcaatcttccacaccaccttttttgcgttcccatcttccaggtcctcttggttactaaaaataatgtctacacttctatttagttttacttcatcttctcacatctatcaaatattttttaaagatatgtttaagaataggaacagtatttttctttctttttttttaaattgctgctccttgtagagcagggctacgctgcaggcagtgtgcccagaatagcaagaacagtatttct

SEQ ID NO: 378 - DNA, 300 bp, synthetic construct
  source 1..300: mol_type = other DNA
tctttcttttttcttttttgagacagagtctcactctgttgcctaggctggagtacagtggcgcaatctcaaatctcggttcactgcaacttctgcctcacgggttcaagtgattctcctacctcagcctcctgagtagctgggattacaggcgcatgccaccacacccagctaatttttgtatttttaatagagatggggtttcaccctgttggtcaggctggtcttgaactgttgacctcgtgatccgcccgcctcggccttccaaagtgctgcgattacaggcgtgagccaccacac

SEQ ID NO: 379 - DNA, 300 bp, synthetic construct
  source 1..300: mol_type = other DNA
gaagttcaagaaaagcctggctgacatggtgaaaccccgtctctactaaaaatacaaaaactagccgggcgtggtggcgtgtgcctgtaatcccagctactcgggaggctaaggcagcagaatagcttgaacccgggaggcagaggttgcagtgggccaagatcgcgccattgcactccagcctgggcaacaagagcaaaactccatctcaaaaaaaagaagaagaaaaatggttacaaagactatgcagcaatatggaaagtgattatgtgtgggcatagtgttacaacaactacctac

SEQ ID NO: 380 - DNA, 300 bp, synthetic construct
  source 1..300: mol_type = other DNA
acctcatgttgagaacctttgatccagactgcagagggctggctggcaaatcagctgcatgttgggagtcacctgaggaatgttttaaatgctgatgcctgagtttggacctgaggttcaaatgtaagtgatctggaatgtggcctgggatcaggatttttgtaaagcactttgggtgagtccatgtgcagtagattttgagagctgtattctagtggatctgccctgttgctaacccaccagaaggaaccagagcagaacgtgcccttttggaaataactgggaccatgaagagactgt

SEQ ID NO: 381 - DNA, 300 bp, synthetic construct
  source 1..300: mol_type = other DNA
ttactgtaccttaccatagcctatactgaccaataaactgaaaatttcctgtgttagtccatttgagctattataaaggaatacctgaggctgggtaatttataaaggaaagaggtaattggctcatcgttctgcaggctgtacaagcatggtgctggcatctgctcagcttctgtagaggcctcagggagcttttactcatgacggaggctaagtgggagcagacagtcagtcacatggcaagaaaagtagtgagagagagagaggggaggtgccacaaacttttaaacaacgagatct

SEQ ID NO: 382 - DNA, 300 bp, synthetic construct
  source 1..300: mol_type = other DNA
gaaacagttccagagtttctgctgctctctgtcagagctcttcatgtcctctttccagtcctacggagccccacggggggacaaggaggagctgacaccccagaagtgctctgaaccccaatcctcaaaatgaagatactgacaccacctttgccctccccgtcaccgcgcacccaccctgacccctccctcagctgtcctgtgccccgccctctcccgcacactcagtccccctgcctggcgttcctgccgcagctctgacctggtgctgtcgccctggcatcttaataaaacctgctt

SEQ ID NO: 383 - DNA, 300 bp, synthetic construct
  source 1..300: mol_type = other DNA
ctactaaaaatacaaaaattaaccgggcatggtggcgtgcacctgtaatccccgctactagaggggctgaggcaggaattgcttgaatccaggaggcggaggttgtggtgagcagagattgcgcgactgctctctagcttgggcaacaagaatgaaactccgtctcaaaaaaacaaaacaaaacaaaacaaacaaacaagaaaaacatcagacctcgtgagaactcactcagtttcaccagaacagcatggtggaaaccacccccatgatccaatcacttcctaccaggtccttcccttg

SEQ ID NO: 384 - DNA, 300 bp, synthetic construct
  source 1..300: mol_type = other DNA
ataattacaccactgcactccagcctgagcaacaaggcaagatcctgtctcaaacaaaacacctaattatttggagtatatagaatttgaacttgttatgcatgtatgaacagaagttatttggagtatatagattttgaagttggcttagatgtatgatgaattctcagaggttatgattaattatctttacctttcattctataagattttattgaataccttctagatgctagaatttcagcaatgagcaagactgataaggtctttgtctaaggaagaacatagaccccataaaat

SEQ ID NO: 385 - DNA, 300 bp, synthetic construct
  source 1..300: mol_type = other DNA
agaaagaaattgaatgctgattatgtggtttatggtatgtggattttaataaatcaaatttgtcactttaaaaaattagagctccagcctgggcaatgtggcgaaactgcatctctactaaaaatacaaaaaattacccgggcatagtagtgcacacctgtagtcccagctactcaggagggtgaggtggaggatcacctacctgagcctgggaagttgaggcggcagtgagctgtgattgcgccactggactccagccttgttgagaatgaattaattaattaattaaaattagagctt

SEQ ID NO: 386 - DNA, 300 bp, synthetic construct
  source 1..300: mol_type = other DNA
tctcctgccagacttcccagacctggcaaaggtttagaaactgttgctaagaaaagtggtccatcctgaataaacatgtaatactccagcagggatatgaagcctctgaattgtagaacctgcatttatttgtgactttgaactaaagacatcccccatgtcccaaaggtggaatacaaccagaggtctcatctctgaactttcttgcgtactgattacatgagtctttggagtcggggatggaggaggttctgcccctgtgaggtgttatacatgaccatcaaagtcctacgtcaagct

SEQ ID NO: 387 - DNA, 300 bp, synthetic construct
  source 1..300: mol_type = other DNA
gagcaacttttcacatgcttattagtcatttgtatagcttcagagaactgtctattcagatcctttgtccatttttaaattgggctgtattttatcatggaattattggagttcttattttctggatgcataaattttatttttttaattttttaagttgatgtaggcgtgttttataggtgccaggcaccgtactaagtgcctttttgtacattaactggcagtcctatgatatatgaactaaattttaactccattttatacatggcttttttctctatttattttaacatatttata

SEQ ID NO: 388 - DNA, 300 bp, synthetic construct
  source 1..300: mol_type = other DNA
caattattctaccataaagacacatatgttaatcacaacactattcacaatagcaaagatacataatcaatctaaatgcccatcaacagtagactgaataaagacaatgtggtacatatacaccatggaacactatgcagccataacaaagaagagatcgtgtcctttgcagcaacatagttgaagctggaggccaatattctaagcaaactaatgcagaagcagaaagctaaatactgcatattctcacttataagtgagaactaaacaatgagaacacgtggatataaagagaggaac

SEQ ID NO: 389 - DNA, 300 bp, synthetic construct
  source 1..300: mol_type = other DNA
tctcagcttgcagttttttggaccacccagggactgtgaatacaggctgtaattccacataggaaccaggtttggttacaaattctcgggaaagatatccaccaacgcccctactcattgtcaaagtttgaaacaggtaatttaccttgcagtctctaccatgggagtattcatctatggagtcccaatttttactgggtggggtggggagtgtctcctattagataccctgctttggatggggtctgggttttgtcacttggctcttgtgcctacaggactatgaaaaacaaagctctt

SEQ ID NO: 390 - DNA, 300 bp, synthetic construct
  source 1..300: mol_type = other DNA
atatttcccaaatttgatgaaagacatgaatatattcatccaaaaacttaaacattaagcaggatgaagtcaaagagatccacagtaagacatgttatactcaaattctacaaagcaagagaatctagaaagcaaaaggagctaactcttcacgtacaaggaatcctcaataagattaacagtggatttctcatcaaaaactatggaggccagaaggaagtgggatggcatatttaaaatagtaaaagaaaataactgagaattctatatttggaaaaactgtccttcaagagtggagaa

SEQ ID NO: 391 - DNA, 300 bp, synthetic construct
  source 1..300: mol_type = other DNA
gaagcacctcatcaaactgggcgggagcatagagtttacatgtatttttattagaacgtgcagatctttataatctacattactgtttatgataaacatgctattacacaggatcacagatagattaccccattttatatgaggtgattattacacactacatgcctgtatcaaaacatctcatgtaccccatatatatatatatatatatatatatatatatatatatatatatacacacatacatacatacacacacacacacttaatatatacgcataaaaattaaaattaaaaaca

SEQ ID NO: 392 - DNA, 300 bp, synthetic construct
  source 1..300: mol_type = other DNA
ggcgtgtaccaccatgcccggctaatttttttcacgatgttggccaggctggtctcgaactcctgacctcaggtaatctgcccacctcagcctcccaaagtgctgggattacaggcatgagccaccgtgccaggcccagttccaccatttctaaaagggaataataattatacccacccaatatggttattgtgaggagtaaataagtagagtgtttagaactctctctggcatataatcagcactcaatacgtgttaactatttcactatttttgttatcatcatcatcaaatttcaga

SEQ ID NO: 393 - DNA, 300 bp, synthetic construct
  source 1..300: mol_type = other DNA
aacccagcctgtgcctccactggctttgcccactgcacccccgcctgctctagccctgagaagcctgcaggtctgtgcagcagtggctgcctcttttaatgaaagcattccccatgggaagaggcctggctatttaacaaggaaatgtgtgggtggtagaaactgctccgatgctggcagcggcataaatccagcagaaaggaacaggaacctcagaggcttcctaacagacatcatcttcctgccaaggggaagaaaataatatcagtggggagagaatgaactcaagacataggcagc

SEQ ID NO: 394 - DNA, 300 bp, synthetic construct
  source 1..300: mol_type = other DNA
ttccaactttatgcatacctctaacttgagtttgcatctattaccatttcttgaggccctagacttttcaaactccaggctttgagctgaaaaagttgcaaaagaatataaagaatgaatctgtaaactgatttcttaattgtatattctgaattccagacagagtcactggccacatggcagtttcagaaattaaaccaaaacttaagctgaatcctctaacaaaagtacccatctcccacaataaaaggtaggtaatgaatgattaagggtgataaatgtattatgataaagaattat

SEQ ID NO: 395 - DNA, 300 bp, synthetic construct
  source 1..300: mol_type = other DNA
acaagaagctccctctatgtgccctgtagggacatttttcttggagaatcgtaactctaaattcttacctcgcagagagggacccgatgggacctgtttagtaaatattactgagttctgccacttgtcgacaatcttccagggagataactcctaattaattagaaaaagtgcctgccctcgaggcgcatacattctatgagtgagagaaacagacacagatgtgacatggatgccgcagcgcaaggattttgtctgcatgttcattgctgagtccccacgtttagaagggtaccctgc

SEQ ID NO: 396 - DNA, 300 bp, synthetic construct
  source 1..300: mol_type = other DNA
tcagtttcccatttacacccatgatagcacaggtcagtgcccctgaacccccagttcttcagtactgctgggcactggcctgatcttgacttgactgacatctgtggggaggacaaataaaacttagatgttgtaactctatctacaaaaactatgtttatgttaaaaggaaaggaaagagtattttatatatatacaaaatcacctacgtaaatatgactcaaacagacgtacacacagagaagcatagaaaaaagtctaaaaaagtatataccaatatgtacatcaaaaagccataag

SEQ ID NO: 397 - DNA, 300 bp, synthetic construct
  source 1..300: mol_type = other DNA
ggcaggtgcccatgtctcttctatctagagcaacagcttcttgcctggcctccctgcctacccatgctccctccactccctggtttccaaacttcactgcattccggaatcctcagggagcttctcaaaacctaatgcccaggccacactgtagtccagttgaaggaaagtccctacggctgcttccaagcttcagcgcttgccagaactcctcgggttatccattatcatgcagcccaggttggaacgacacctctgcctgtccccacactgcccattctcttctcaaaagccaggtgg

SEQ ID NO: 398 - DNA, 300 bp, synthetic construct
  source 1..300: mol_type = other DNA
atttctctaagtgttcaatagaacatctttcttgccaaatagaattactaaatgacaaggaaagaaaaaacatttaaaatacctgcctgatggcctaatttgttttaggaaaacattatttgtaacaataaataggtcaagataaatagagactagcttgtgataagaagaaaatggaaggaatcaaatggttccagaagcaataatagaaaagacatattgcaggaaattgaattatttataccatatctgtattttaataaattagcactagaagaataataacaataagttagttta

SEQ ID NO: 399 - DNA, 300 bp, synthetic construct
  source 1..300: mol_type = other DNA
cagtcctcccacctcagccacctaaagttctggaattataggcgtgagccaccgtgcctggctgaattatgaggatcaaatgacatcatgtacacaaaggccttagaacagcaacttacacattataggtgctcagtaaatgctcatagtcacaggttaggtgcagttgggagctgtggagaaatataaagtacaatctcttgcctttaaggaggttgcagtctagatggggtgagaggtaataagatagaagatcatgtaaatcacaatgttgggaatgcatgtaaaataatactggct

SEQ ID NO: 400 - DNA, 300 bp, synthetic construct
  source 1..300: mol_type = other DNA
atctaaatctgtgtatatatctacaccatctactctacattggcatctacgtagtcgacagctacctctacagcatctacaatatctatgtcaactacatcgacgtcatccactccatgtacatcatccacatctacgggatctaaactttgcatgcacatctatatctaattatatagatgatataacaatcaacacatgcttgttatatcaaaatgagtggtccttttagactagaaagcaaatctaattttaatttttccctccactggccacacacataaaacgtgagtggaacag

SEQ ID NO: 401 - DNA, 300 bp, synthetic construct
  source 1..300: mol_type = other DNA
ttaagagggacagcgatgcttatttcactgtctatgtgtttatacctgattctttcaaccagggagacagcctgacccatggagaaagcacgagtcaaaggtcaaatgcatccacctgcaggtcctgtcactgaccacttagcatcccacaatatcactgaacctcagtttgctcatacgtaaaataaaattttaaaaaatagaaaatgtaggtagcgtgtctagctcagatggctctagtcccttactgtgacccaaccatttctaatttggcacaagttacaataaaaaacaagcgtg

SEQ ID NO: 402 - DNA, 300 bp, synthetic construct
  source 1..300: mol_type = other DNA
aaaaaaaaaaagcaaactaacaaaaaccaccctgatacgtagagctggggaatggcatgaaggaagagttgtcatgcataaaagtccgataacagaaactaccatgaaatactccacaaaaaacacaaccttgcacagagaccattgcaaccttacacaaaacatttctgcaaggacatctgcccagcaactgcctgtccagcctcgaactggtgtcaccctagttgtggattcttgtagccaaggacaattatttcaaaacaattatgtaatcctccttttttttccctttatttgtct

SEQ ID NO: 403 - DNA, 300 bp, synthetic construct
  source 1..300: mol_type = other DNA
agattgtctcaagaatccttaaatcaggaagggcccagaggccagggccttttccttcaacacagctctgtgaatccaaggcctcatcctttaggacctaagctgggtctggaatttccagacagaatcaggtctcagttcagactgccaacccatcaggtcagtttagaacagatgtggccagagctgtcccttcccttgcttccccctgagaaagatacatgaagccttggaactatagcaaccatactgtgaccccgacacgatgagcatgaggacacgttaaggatggcagaatgg

SEQ ID NO: 404 - DNA, 300 bp, synthetic construct
  source 1..300: mol_type = other DNA
tacaatccaagggttggctcaggctgtattctcatctgagcactctactggggagggtttcaggcttacctgatggttggcggcattcagtccttctagactgtcagactgagggccttggtttttgctggtgcactcagttccttgcttcatatagagtagctcacaatgtagcagcttgtttcactaagacagcaaggaagagtgtttcctagtaagacagacactgtagtcttacctaatacaatcatgaaagtgacatactgtctccttcgccatattctgttagagacaggttac

SEQ ID NO: 405 - DNA, 300 bp, synthetic construct
  source 1..300: mol_type = other DNA
tggctcagcttggatcaagtgcccatcctggtccaaacaactgtagcagcacatctgtgtatttgtgtatcttgttcctccataatcttgcagtccggggaaagtgtgcagatggatgggtccctgaaaagcaagagttgtttagacaacgctagaggtgttcagttctgggagacaagagttgggccaggttgataactagcctaagagagtcggaatcagatgaataagaactagatcttgggtgacaacctagatcaagagtcttgaggttcagtcatttcaaaaagctcaagtctc

SEQ ID NO: 406 - DNA, 300 bp, synthetic construct
  source 1..300: mol_type = other DNA
gggattcaccagggcacaaggcgacgtgcgtctgtcctcacggagcctaagtgctggtggagacggacagtgcagatgccaaccgcaaatgacgaggcacttgcaggtaggggtcagcgccaagaaggaaatgaagggtgcgtgtcgctgactgagactctggtgggagctacttaaatagggccatgggggagggcctctctgaggaggtgacatttgagctgaggcctcaccaatcagaaggaaaaagctgtaaagggtctgggattaactcaacctggggacttttaaaataatgta

SEQ ID NO: 407 - DNA, 300 bp, synthetic construct
  source 1..300: mol_type = other DNA
cgtatgagaaatgaagactctcgggcgctgcctctacctactgaattttagcaagactaccaggtgttccccatgcacatcaaactttgagaaatgctattctaggttgctctcaagtctggctgcagatttgaaacacctggcaagcttttaagacacgtaccaacgctaggtctggaggtggaggggctgtttgttggtattcatattttttagctcctcaagtgaccctcatctaatccttggatccccatccagcctttccacaaactctatgggttctgaccttaaaatatagcc

SEQ ID NO: 408 - DNA, 300 bp, synthetic construct
  source 1..300: mol_type = other DNA
tctagcctggcacagtgcaggcacgtgcctgtggtcccagctgcttgaagtgggaggagagcttcagctcaggatttccaggctatagggagctgtggtcccaccattgcaccccagcctgggtgacagagtgagaccccatctcaaaaagaaaagaaaagaggctaggcgcagtggctcaggcctgtaattcaagcactttgggaggctgaggcaggcggatcacttgaagtctggagttcgagaccagcctggccaacatggtgaaacccccccatctctattaaaaatacaaaaatc

SEQ ID NO: 409 - DNA, 300 bp, synthetic construct
  source 1..300: mol_type = other DNA
agccttgtcttctgccaccccactcagccttcagattcacgtctctagattcttgaggttgggaaatgtttctctagcagccatggttttgcattcattggccattcaggttttctgctttgccatcttcccccgggggtttccttatcctcctggaagcacaactaggcatttaagtccatgttgactgtattttacctgctatttctatgtgttttgcaataagggcttttcaagatacccataacttgtggctaaaaatgaggtttgttccaatgtgccttagaaatatccagtttc

SEQ ID NO: 410 - DNA, 300 bp, synthetic construct
  source 1..300: mol_type = other DNA
cctgacatctcaaaagcctatagaatgcctctaagtttttctctggaggatcaactgagagatgcattcctccgtgaaggcttatatctcattggctgagggctactctgcaggggttacctatgttatccacccccactccactcctgctacaatatgcattaattagtgccaattcttgggcattcttggccacagagtgagggaaagaaatctgttttaggagagatactgtcagcttacagtgagttgaaacccacacaaaaatatctactgcacttgttgccgaattcaatgggg

SEQ ID NO: 411 - DNA, 300 bp, synthetic construct
  source 1..300: mol_type = other DNA
gttctctgatgctgatggaatcaaattagagttaaataccagggaaatcatacaaaattttcacactcagaaattaagcaagatacttctaaaaatacagagattaaaaaagtcttacaaagaacaaaaaatatgttcgggtaaatgaaaataaaaagagaatataccaaaatttctgggattcaggtaaagcagtgctgagaaggaaatttatagcactaaacacttacatcacaaaggtggaaaaatcatgaatcaaccatctaagcttgcagtttaagaaactaaggaaaaaaatat

SEQ ID NO: 412 - DNA, 300 bp, synthetic construct
  source 1..300: mol_type = other DNA
tgaatccattatggaagtagtatagactattttagaatgatccttagctatattactgttatttcctattttaagctttgagaaaaacttgttttcaactctcaagcagttcatgccagttcctggaataaaaagaacatctgggaaaaatcccaattagtgttgttttgtcctagttctcttatttccagtttttccttagagatacaaacgaaagacccctaattatagattttaaagttttccttatcctcttccatttggctactaggtgattctactgtgtaaaaacttagctcc

SEQ ID NO: 413 - DNA, 300 bp, synthetic construct
  source 1..300: mol_type = other DNA
gtaatcaaatatgggctatactgcttctcctgcaaataggtgatcagaacatggacaggaaagacacaccaatttctattcctctgagaagggtgctggggatagatctggggcctaaactgtgttcatgtgttttcttaactaaaacaatttttttaaaaaaaagaatctgaagccattatagtagaataatgttaatatgtattcactctgggtggtgggtacatggatgtttgtactttgaaatatcttcgcatttttaaatattattctgtgaaaagaaggggaagacaaaatgta

SEQ ID NO: 414 - DNA, 300 bp, synthetic construct
  source 1..300: mol_type = other DNA
tccgcggaccaactctcgcgacagccagctcaaagcaggcaagaaccggaaggggcggggacgttccccgtgagccttcgcggtgctggctgctcatctgcatacggaagttcggcacattatgaattatttattttcctcgagggaaaaaattaaatgaaaagcaacaaaatacattattaacaagtgagacaaacttcaatggaactggatcatgacctcaacagtcaactacgatagtcatcatacgcctaatgagaatagaattcattacctaggaaataaactaaaaacgtcctt

SEQ ID NO: 415 - DNA, 300 bp, synthetic construct
  source 1..300: mol_type = other DNA
cagacacaaacagacaaaattgctaagttttaaatggctcctgagaagtgggaattggggatgtgaaatggcctttgcaaaaagtgtaacagtgacaaagttatggcagtgtgtagatctgacctaactgactccatcttgcttctgtgttcattcctgggcataggccaaactaactttgggaagaactttaactttgacataaagattgtaacagccctttcctgaaacaaaccccattcttgcatgggaaccacactgcctttgtaggactaacacatgagccacaatattatggtt

SEQ ID NO: 416 - DNA, 300 bp, synthetic construct
  source 1..300: mol_type = other DNA
cctgacaatttcacaacctaggaaggatgttgagcaactggaatttttatatgttgcttcttaaaacacaaactggacctttctttcaatgttaaatacatagtttacccaaaggtggaaaaccttatcttcacacaagaatctgtacaggagtgtttatggtagctgtattcataattgcttaaaactggaagcaaaccaaatgaccttcagtgggaaaatggataaacaatatgtgatagaagtatcacagatgtttacataacctgtgatacttagcagtaaaaagtaaactaataa

SEQ ID NO: 417 - DNA, 300 bp, synthetic construct
  source 1..300: mol_type = other DNA
aagattaccaaatgagtattgaatggcttcaaagctgtttcccgggcacccccaaaccctagattcccttgaatctttcctgattcagcctggtccctggtagggaaggaccccagcctttaggaaatatgggagaactggagaaataaagcaaaggggagggcggtggcagtgtggtaagaaataagtcgaagtaaattggggacacttaagctttcagttcctttaaacatctgtttcctttgggcaattcacacttccagaagagttcttgagatgccgtttaaagataaaaaaaag

SEQ ID NO: 418 - DNA, 300 bp, synthetic construct
  source 1..300: mol_type = other DNA
ttaaatccgggaggcaaaggttgcagtgaaccgagatcacgccactgcactccagactggacgacagagcgaaactccatcttaaaaaacaaaacagaacaaaaaagtgagaacatacgatgtttgcttttccattcctgagttacttcatttagaatataatggtttaaaaaaaaaagaatatgatggtttctttccttcctccctttcttcctcctcctcttcttctttctctctctctctctcgctctttctctctcagtaaaataacctaatttatttttttaaattcccagtacc

SEQ ID NO: 419 - DNA, 300 bp, synthetic construct
  source 1..300: mol_type = other DNA
aatcccagcaatttgggaggccgaggcaggtggattgcctgagctcaggggtttgagaccaccctgggtaacacggtgaaacctcctctctactaaaatacaaaaaattagccgggcgtggtggcgggcacctgtaagtcccctacttgggaggctgaggcaggagaatcattggaacccagaaggcagaggttgcagtgagccaagatcgcgccactgcactccagcctgggcaacagagggaaaccctgtctccaaaaaaaaaaaaaaaaaaagaatattcttgaaaaaaaagaaata

SEQ ID NO: 420 - DNA, 300 bp, synthetic construct
  source 1..300: mol_type = other DNA
agttccctggagaagcctctccttcttccaagtcccagcctgaggcctctcctcttctaggtgaacaacaccaatctgcaggatgtgaggcacgaggaagctgtggcctcactgaagaacacatctgatatggtgtatttgaaggtggccaagccaggcagcctccacctcaacgacatgtacgctccccctgactacgccagcagtacgtactcatcagcccctgtccctggtctaaagctctgtcccctggtttctggaggggaagaagttcataccctttgttaagagagggcaagc

SEQ ID NO: 421 - DNA, 300 bp, synthetic construct
  source 1..300: mol_type = other DNA
atccttagggtatttagtcagaatggaatattatgagtcaaagatattgatcagaagtcagtcgaaatttaaaatatcttctcttggatttattttcttcataactattatcatgcaataatgatgcaaatgcagtacaaacaaaaacatagatgaacacagatgcatttgcttgataagtacagacaaggaaacagcatggtagaaatttgcccaactagactttcattctagtagctaagctttatgctttttttcttaacttgatattttaaaaacttgaaaaaaaaaagaatcagt

SEQ ID NO: 422 - DNA, 300 bp, synthetic construct
  source 1..300: mol_type = other DNA
tgaagtgtgagtttgtgtttgtgcgtgtgctgtgactctttgatgtgtggtggaagatttctgggaactaattttagttcctgagttctaattctagttgagtctgagatcaccacaggtagtgtcactattttgagcaattgtacaatttctttacattatccccaaaaggcctatgcccacataggtacacaggagtgctaatcaatgtagtgagtaggtaaaaaccctgtttttgtcttttgtaagtttaaactgttttctgtcccctaaagagaaacccttaaataaaaatgatga

SEQ ID NO: 423 - DNA, 300 bp, synthetic construct
  source 1..300: mol_type = other DNA
tagcttgaacccaggaggtggaggttgcagtgagctgagattgcaccactgcactccagactgggcaacagagcaagactctgtctcaaaaaaaaaaaaaagaaaagaaagaaaaggaaaaaaaagaaaaacaaaagttggttgctttctgtaaatgtgaccagatttgaatgaatgcatgtaaatctatgctgtactttgctggggaggtttttgtcagggataaggatgggggcaaactatgttaagggaagtgatgacaagaaagccttccctgcgattaagaaattataataatat

SEQ ID NO: 424 - DNA, 300 bp, synthetic construct
  source 1..300: mol_type = other DNA
gagacattggaccagcaccttttgttcaaggtgacagtaacataagcctgctcaaataagtaacatttccctttgccactggctcatttgagtggaatgacaaagtttgcttgcgtttgtgtggacagacccacacaaccctggcactgataaatattcagtatgtctttatgttttcacactaagcagcactgaaaagtggtcaactttttgtttgttttttgttttagagagacatctgtaatcctgctgatgctcatgtgctgaaaactatgaccgtactcaataaagaaggagaca

SEQ ID NO: 425 - DNA, 300 bp, synthetic construct
  source 1..300: mol_type = other DNA
ccttagggtatttagtcagaatggaatattatgagtcaaagatattgatcagaagtcagtcaaaatttaaaatatcttctcttggatttattttcttcaaaactattatcatgcaataatgatgcaaatgaagtacagacaaaaacatagatgaacacagatgcatttgcttgataagtacagacaaggaaacagcatggtagaaatttgcccaactagactttcattctagtagctaagctttatactttttttcttaacttgatattttaaaaacttgaaaaaaagaaaagaatcagc

SEQ ID NO: 426 - DNA, 300 bp, synthetic construct
  source 1..300: mol_type = other DNA
tccagaagaccgagaatggctgttagatacaatagaatgctctaagagtcactatcaaaaatgagcatatcagtgcataaaatgtgtggtagtttagcagttatttcattgtttaccgtagtgttttttcttacaattttgtagaagcctgtgtcagaattaagaacttttttagaagagaataatcatggatgattgaaattaacattttaagctgatactgaaaattattctaaattctattacatttctatttgtattttctttcaaaggctaatggaagtcttaaaaagaaaatgg

SEQ ID NO: 427 - DNA, 300 bp, synthetic construct
  source 1..300: mol_type = other DNA
ataaaattccagaagaccgatgatggctgttagatataacagaacgctctgagagtcactatcagaaatgagcatatcagtgcataaaatgtatggtagctttatttagcagctgtttcattgtttaccatagcattttttcttacaattttgtagaagcctgtgtcagaatcaagaagttttttttagaagatgataatcatggatgattgaaatcatactgaaaattattctaaattctattatatttatagttgtattttctttcaaaggataatggaagtcttaaaaagaaaatgg

SEQ ID NO: 428 - DNA, 300 bp, synthetic construct
  source 1..300: mol_type = other DNA
cagagcgaaaatgactgttagatacaatagaacactctaagagtcattatcaaaaatgagcatatcagtgtgtaaaatgtatggtagttttatttaacggttgtttcattgtttaccgtagtgttttttcttacaattttgtggaagcctgtgtcagagttaagaacttttatagaagaggataatcatggatgattgaaattgacattttaagctgatactgaaagttattctaacttctattacatttatagttgtattttctttcaaaggataatggaagtcttaaaaagaaaatgg

SEQ ID NO: 429 - DNA, 300 bp, synthetic construct
  source 1..300: mol_type = other DNA
gaaggctgggaaaggctgttagatacaatagggtgccataagagtcactatcaaaaatgagcatatcagtgcataaaatgtatggtagctttatttagcagttattccattgtttaccatagtgttttttcttacaattttgtagaagcctgtgtcagaatttgaacttttttagaagacagtaatcatggatgattgaaattaacattttaatctgatactggaaattattctaaattctattacatttatatttgtattttcttttgaaagctaacggaaatcttaaaaagaaaatgg

SEQ ID NO: 430 - DNA, 300 bp, synthetic construct
  source 1..300: mol_type = other DNA
aactcaccgagcctggggaatacgacccacttataatgtccaagaccttcctctcatcccaagtttatgacaatttccacccataatcaaaatttcctaaacttactttctgtttttttgttttttttcatttggtagagacagagtctccttctgttgcccaggctgatatcaaactcctgagctcaagggatcctcccacctcagccttccaaagtgctggcatttcaggcataagctaccgggcctagccttacttcacttttctaagaaacagtattattacctcattagtcaata

SEQ ID NO: 431 - DNA, 300 bp, synthetic construct
  source 1..300: mol_type = other DNA
gcaacagaaaacctttttttgaggagtccctaaggcttcaccagtttgtcaaaattggagcttgattgctgagactttatttgcatacccacaatgcattgtgcaccaaataattttcgtctttaaaattactagtcccctttttccttcaatctatctttcctgaaactgagattgctgttccagaattgtctgaagaaaaaggcagaagtcaatagctcttttgggcagaaagaaatttaccattagcctgttgggagtagccattacctgagaactgagtgccactcatcgaagttc

SEQ ID NO: 432 - DNA, 300 bp, synthetic construct
  source 1..300: mol_type = other DNA
gagcttgcaccactgcactccagcctgggaaacagagcaagaccctgtcttaaaaaacagataaacaagcaaacaaacttagacaaagagttaccaaatgatccagaaattctaccccccaaaatatacccaagaaaataaaaatatatatccacgcaaaaacttgtacataaatgttcatagcagcattagtcgtaatagccaaaagtagaaacaagtatccatcaactgatgaatggataaataaaatgtggtatatccatataaaagaatattatttggcaaccgaaaaagaagtat

SEQ ID NO: 433 - DNA, 300 bp, synthetic construct
  source 1..300: mol_type = other DNA
gattggtcggttgagtggcagaaaggcagacggggactgggcaaggcactgtcggtgacatcacggacagggcgacttctatgtagatgaggcagcgcagaggctgctgcttcgccacttgctgcttcgccacgaagggagttcccgtgccctgggagcgggttcaggaccgctgatcggaagtgagaatcccagctgtgtgtcagggctggaaagggctcgggagtgcgcggggcaagtgaccgtgtgtgtaaagagtgaggcgtatgaggctgtgtcggggcagaggcacaacgtttc

SEQ ID NO: 434 - DNA, 300 bp, synthetic construct
  source 1..300: mol_type = other DNA
cggaagaaccccgagtccactgtaagctcaggggagagcgggagccagggaggtgaagtgcgcagactcggcagaggcggcgggcagaaccgcgcgggggtgagagggcgcggtggctgcggggcgggagccgctgctgagaggcggcctgggttgtcttgtggggtgactgtcggtggaatctttggtggagagtggtttggaagaatggcgaggggcggcagtggggagggtggtgaccctgagcgaccggccagggcgaggaggctgtgctgtccctgcaagccatgtgctcatttc

SEQ ID NO: 435 - DNA, 300 bp, synthetic construct
  source 1..300: mol_type = other DNA
tgttagttaccttgctgttccttgataaaaagctaccttcttacatatcttacttccaataaagaggcagattccctatgtactgtttatctcgggaaagaaatacatgtgggaaaagaagcaattttcttctcattgcaattaaattaaatcatgaccacctgttgtgggattatcctgccatctgctgttcaaaagagaaacaacagcagagaaccagaaagaagaggcaaaatgttggaaagctttgctcccagatgtccatcagttgattacggttattggtatagttaaaatttt

SEQ ID NO: 436 - DNA, 300 bp, synthetic construct
  source 1..300: mol_type = other DNA
ggtggatcacctgaagtcaggaggtcgagaccagcctggccaacatggtaaaaccctgtctctactaaaaatacaaaaattagccaggcatagtggtacgcacctgtaatccctgctacttagggagctgaggcagaagaatcacttgaacctgggagatggagattgcagtgagccaagatcacaccactgcactagcctgggcaacagagcaagactctgtctcaaaaaaaaaaaaagtgtgtgtgtgtgtgtgtgtatatatatatatataaacataaactcactaacataagttta

SEQ ID NO: 437 - DNA, 300 bp, synthetic construct
  source 1..300: mol_type = other DNA
ccaaatatgacataaatacttgataaattttctggtaaatatattttaatggaatttttttaactgaggagacatttgaaagttacttgaataagttccaatgaataaatacatggacagaattttaatctctggaatttgtgagatggggtttttacgagtctttgacaaattttcctatgtttaagacttttcctaagtatttgtatgtatgttgcttcatgtgaaacaacctttttaaatttgaaattaataaaatgggtttttcaatcaactctgagtgaagatagaaaaatttat

SEQ ID NO: 438 - DNA, 300 bp, synthetic construct
  source 1..300: mol_type = other DNA
agtcaagtgcctctctccatttactggtaagagagagagggtttagaggaactcttgttccggcgctcagctcatttgcatcccagaatgcattgtagatacgagaattattaccagggttatctgtttgaataataatatttaaactttttttctttgtcaggagattttacccagtgagaacatgtttaggacacttttctacagtggaagaaaagcttctgtctgcaggtccaaaggcaccgtaagtagagggagaccagtcaatagctgggaagccaggcaaaaggctaacaggca

SEQ ID NO: 439 - DNA, 300 bp, synthetic construct
  source 1..300: mol_type = other DNA
gccccctggtggtggcctaacgcctagaaaaagtaacgaactatttaaggtatttctggaaaccgagggggtggtgactcagcgtcatttacatacccacaatgcactgcacacagaccacgtcctactttaaaaggagattctcccttttttccccctcttttcctttaccataataacgaagctcctttcacacaatcgtctgagacaaaaacagaagtcactcttttgggttaatagtaaccattgctaatctagtagtgaccgtcccccgaggactgtgtgcaaccattccaacac

SEQ ID NO: 440 - DNA, 300 bp, synthetic construct
  source 1..300: mol_type = other DNA
cagcagagaggagcataggagagcaaaggagatcagtgacccatggcttccccggtggcgcggaacagcccggagccgcctgtgatttgcatacccatggtgcaccacgaaaagataccctcaagatgcttgcactccctctgtgcgcgcatttctgcactgttttagagcatgatgcctcttacacgcatctgtgtgcataaactacatatagggagtgcgtaccacgcaggcatccaacaaccataagtgtgttaagtgttagttctccctgcgaggttcgaagcggaagtcacgaat

SEQ ID NO: 441 - DNA, 300 bp, synthetic construct
  source 1..300: mol_type = other DNA
cctgtgagggtggagtgtaaggagaccatcaaacgacctgagagaatgtgctcagccatccacaaagtgctattgaaagcagggggcttgaggaagaatgtggaccctggagttctaagactactgtgacagttttattccccagccatgcctggcccagagtctggcctgggggtgtggctggtgcctctgcactactcttgggccttcatggattctgccagcaggtgtcctcaaggtgcccccaaatgaattcgctgccattgggcaagatcaggcactcagtaaaaattgaaaaac

SEQ ID NO: 442 - DNA, 300 bp, synthetic construct
  source 1..300: mol_type = other DNA
taattcaagtcctttaccaattgtgtggttttgtggtttaaaacatggcttacccttatctatcacaacaattttctaatttctgaaaagtccctccttctctgtcccaattccatacttttctgttccacatgaagttgagatacccaaacttgtttaaaataaatttaaagtatctggaaaattaatttaacaatcctttcagtaatttattctgtacattcacaaccaagtacttttcagaatggttataaaacctcaggaatatatgaaatttatgaaataaaaaaagaaaacttc

SEQ ID NO: 443 - DNA, 300 bp, synthetic construct
  source 1..300: mol_type = other DNA
aaaatattcattaaaccataccataaacagatgtgctatcatccaggctttgctgttccatttctagagcacaggcagagtagatttagcataattctgaagggctctaggattttcagaatggcaaatgagcactgatttcaatttaaagtcaccagctgcattagcctctaacaagagagtcagcctgtcctttgaagctgtgaagccaggcatggacttttcctctttagctatgaaaatcctagatgacatcttctttcaatagaagactgctttgcctaccctgaaaatctttgt

SEQ ID NO: 444 - DNA, 300 bp, synthetic construct
  source 1..300: mol_type = other DNA
cataatatttatgtctgcaaaggttatgaggacaaaatatgctaatatgagtcaagcatttagaatgccagctggccctataaatgttagctactattatggtgctttagatgaattcagatatcactttaagttctaatgttccatgattctggaattaataaaatactgtgcaaacaacagagaaccatctttactatgaaattaacccagtttgtgtctttgccttaaacaattctaaagtgattctcaaagttcgtaagccaagagagtggcttttagtttttaaaggactaaatc

SEQ ID NO: 445 - DNA, 300 bp, synthetic construct
  source 1..300: mol_type = other DNA
ctgcctcatcctccctagtagctgggattacaggcgtgtgccaccatgcccaactaattttttgtatttttagtagagacagggtttcaccatgttggccagactactctcaaactcctcacctcaggtgatctgcccgcctcagccccgcaaagtactgggattacaggtgtgagctaccgcatccagccagaaaggtagattctaatctgatctgtgtcttctaatgcccactgttctcccattgcttaatatcaccgtatgttaggctgttcttgcattgctataaagaaatatcta

SEQ ID NO: 446 - DNA, 300 bp, synthetic construct
  source 1..300: mol_type = other DNA
tcagcttcattctcagacatgctctccctcaccatggtggcagaggtagctatcagtactgggtttctgtcattctcacagctatgggtgcctcttttgccatacttctagcagtagtgagtaccaaggagggaccttgaccagcccagattggattgcctgcctgaatcagcatggccagaaatatgcagtagacaataagcagcatcactttggctaaggcctgttcatgtgtcccatgagagagggtaaatcccaccagaattacacagaacgggttccccatggaaaaaggagggg

SEQ ID NO: 447 - DNA, 300 bp, synthetic construct
  source 1..300: mol_type = other DNA
caaagtaggaatcagaaaccgtttcctgatgctttgcttcagcttcccaactgctttgagttttaaagctcttgttgctgtcaggagtatacacttttctaagtagaagagacctgatgtcagagacactgatttataataaaaataatttttactttgtgttacagcatatataagaacacataagaagtgctcccagtggttattgatttctaagtggaattaggttataaataatacaatgcaaaactagatttgttaatgttaaggtatagttgtttaacaaaattatgattttcc

SEQ ID NO: 448 - DNA, 300 bp, synthetic construct
  source 1..300: mol_type = other DNA
gattgtgccactgcactctagcctgggtgacaaagcaaaaccctgtctcaaaaaaaaaaaagttatctcctaaaattttgtaaaattacttttttttctccaggggaggagaaaacatcaagaaaacaaaaagagaaatatcaaaatcattctttcggttcttttgtggttttcaaccacttttgggttttccccttgcagaaaccacagaaatattctcttagaataaaatagtttatctgtttaaaaaaagaaagaaagaaaagaaaagaaaagaaaaatgtgataaatgtgatctct

SEQ ID NO: 449 - DNA, 300 bp, synthetic construct
  source 1..300: mol_type = other DNA
gactcaagtttttttgggagggaaactgccttgctttcctcttctatatattacagggtctagcaaattaaattacacatggcaggcaatgagtaaatatttacaaaatcctttttgaataagaagatgtaaaggaaatgttctcagttttaaagattattatgaggtactatggcaaaatggaaaaatataggctctggattggacagacccagttttgaatttcagtcacttaaaaatctctttgaaccacatcctctccctaaagtgggatagtatgtactccttaaaaattgttgg

SEQ ID NO: 450 - DNA, 300 bp, synthetic construct
  source 1..300: mol_type = other DNA
cccacctacctgcaggcctcaccccatgggggatggcctgacttggtctcattatttgttcctctatcccccaggcctcttccttggtgctggctaagggctaggctggatgtttagttgtagccctaaggaaaaattttagtatgtccacttttatacacagaggcacagatggtaagcagttatgaaagttgtccgaatcaaaatggagtaatttatgttaaaaccctggcaaatggagccagggaaggccatcaagggagagttcttacacatgaatgcctgataagaactgtcaca

SEQ ID NO: 451 - DNA, 300 bp, synthetic construct
  source 1..300: mol_type = other DNA
tcggctgagtcggcggagggtggggcggaagagcagacggggactgggaaaggcgctgtcagtgacatcacggatagggcgatttctatgtagatgaggcagcgcaggggctgctgcttcgccactaaggagttcccgtgccgtgggagtgggttcaggaccgctggtcggacctgagagtcccagctgtgtgtcagggctaggagggctggggggggcggggaggtgcgcggggcaagtgaccgtgcgtgtaaagggtgaagcgtgtgaggctgtggcggggcggaggtgcaaaagctt

SEQ ID NO: 452 - DNA, 300 bp, synthetic construct
  source 1..300: mol_type = other DNA
gggttcggaagaaccccgcgtccactgtaagctcaggggagagcgggagccagggaggtgaagtgcacagactggacagaggcggcgggcagaaccgcgggggtgagagggcgcgtggttgcggggcgggagccgctgctgaaaggcggcctgggttgtcgtgtggggtgactgtcggtggaatctttggcagagagtggtttggaagaatggcgaggggggcagtgggtagggtggtgaccctgagcgtccggccagggcgaggacgctgtgctgtccctgtagggcatgcgctcattc

SEQ ID NO: 453 - DNA, 300 bp, synthetic construct
  source 1..300: mol_type = other DNA
ttcccaagaagggttggggacgaaccccctgtccactgtaagctcagaggggagccggggcgagggaggtgaagtgcacagactgggcagaggcggtgggtagaagcgctggggtgagagggcgcggtggctgcggggcgggatccgctgctgaaaggacggctgggttgtcttgtaggtgactgtccgtggaatctttggcggagagtggtttggaagaatggcgccggccaagcagaggggaaggtggtgaccctgagcctgcggctacgggacaggaggctgtactgtccctcctct

SEQ ID NO: 454 - DNA, 300 bp, synthetic construct
  source 1..300: mol_type = other DNA
cgggcggaagagcagatggggaccgggaaaggcgctgtcggtgacatcacggatagggcgattcctacgtagatgaggcagcttaggggctgctgcttcccacgaaggatttctcctgctttgggagcaagtccaggaccgctggttggacgtgagagtcccagctgtgtgtcagggctaggagggctccgggtggcatggggcggggtgggggtgggggtgcgggtgcgcggggcaagtgaccgtgtctgtaaaggttgaggcgtatggagctgtcgcagggcggagatgtgtgaactc

SEQ ID NO: 455 - DNA, 300 bp, synthetic construct
  source 1..300: mol_type = other DNA
gtggcagagggtggggcggaagaacagaaggggactgggaaaggcactgtcggtgacatcaccgatagggcatttctgtgtagatgaggcagcacagggttgctgcttcgccagggagaattccccgtgctgtaggagcaagtccaggaccgctggtggatgtgagagtcccagctgtgtgttagggctagaagggcttggggtggttggggataggcgggggtggttctcagggcaagtaaccgtgggtgtaaagggtgaggcatatggagctgtggcagggcggaggtatgtggactg

SEQ ID NO: 456 - DNA, 300 bp, synthetic construct
  source 1..300: mol_type = other DNA
agaaaggcagacggggactgggaaaggcactgtcggtgacatcacggatagggcgacttctatgtagatgaggcagcgcaggggctgctgcttccccacctgctgctgcgccacgaaggatttcccgtgccgtgggagcgggttcaggaccgctggtcggacctgagagtcccagctgtgtgtcagggctaggagggctgggggtggggggggggggggggggggctgcgcggggcaagtgaccgtgcgtgtaaagggtgaagcgtgtgaggctgtggcggggcggaggtgcaagatctc

SEQ ID NO: 457 - DNA, 300 bp, synthetic construct
  source 1..300: mol_type = other DNA
gggtttggaagaaccccgcgtccactgtaagctcaggggagagcgggagccagggaggtgaagtgcacagactggacagaggcggcgggcagaaccgcgggggtgagagggcgcgtggttgcggggcgggagccactgctgaaaggcggcctgggttgtcgtgtggggtgactgtcggtggaatctttggcagagagtggtttggaagaatggcgaagggggcagtgggtagggtggtgaacctgagcgtccgaccagggcgaggacgctgtgctgtccctgcagggcatgcgctcattc

SEQ ID NO: 458 - DNA, 300 bp, synthetic construct
  source 1..300: mol_type = other DNA
gcagagggtggggcggaagagcagacggggacgggaaaggcgctgtcggtgacatcacagatagggcgattcctatgcagaggaggcagctcaggggctgctgcttcaccacgaaagatttctcgtgctgtgggagctagtccaggacctccggttggacgtgatagtcccagctgtgtgtcagggctaggaagacttgaggcggcatgggggcggggtgggggaatgcgcgggccaagtgaccatgcgtgtaaggggtgaggcgtatggagctgtggcagggcggaggggcgttcattc

SEQ ID NO: 459 - DNA, 300 bp, synthetic construct
  source 1..300: mol_type = other DNA
cgggttggtcggctgagttggcggaggttggggtggaagagcagacggggactgggaaaggcactgtcggtgacatcacggatagggcgacttctatgtagatgaggcagcgcagaggctgcgcttcgccacatgctgcttcgccacgaaggagttcccgtgccgtgggagcgggttcaggaccgctggtcggacctgagagtcccagctgtgtgtcagggctaggagggctcgcgggtgcgcggggaagtgaccgtgcgtgtaaagggtgaggcgtacggggcggaggtgcaggagctc

SEQ ID NO: 460 - DNA, 300 bp, synthetic construct
  source 1..300: mol_type = other DNA
taggctgagcggcagaaaggcagacggggactgggaaaggcactgtcggtgacatcacggatagggcgacttctatgtagatgaggcagcgcaggggctgctgcttccccacctgctgcttcgccacgaaggatttcccgtgccgtgggagcggattcaggaccgctggtcggacctgagagtcccagctgtgtgtcagggctaggagggctggggggggtggggctgcgcggggcaagtgaccgtgcgtgtaaagggtgaagcgtgtgaggctgtggcggggcggaggtgcaagagctc

SEQ ID NO: 461 - DNA, 300 bp, synthetic construct
  source 1..300: mol_type = other DNA
gccgaacggcctttcccccgtcctgcccctcgtccactgtaagctcaggggggagcgggacccagggaggtgaagtgcacagactcggcagaggcggcgggcagaaccgcgggggtgagagggcgtggtggctgtggggcgggagccgctgctgaaaggaggcctgggttgttgggagggtgactgtccgtggaatctttggcggagggtggtttggaagaatggcgaggggagagcagaggagaaggtggtgaccctgatcgtccgccaggggagagtaggctgtgctgtccctcctct

SEQ ID NO: 462 - DNA, 300 bp, synthetic construct
  source 1..300: mol_type = other DNA
gctgagtggcggagggtggggcagaaaagcagaccgggacgaggaaggcgctgtcggtgacatcacggatagggcgacttctatgtagatgaggcagcgcaggggctgctgcttcgccactggctgtttcaccacgaaggagctcccgtgccgtgggagcgggttcaggaccgctggtcggacctgagggtcccagctgtgtgtcagggctaggaaggctcgggggtgcgcggggcaagtgaccatgtgtgtaaagggtgaggtatatggggctgtgacagggcagaagtgtgtgaagtc

SEQ ID NO: 463 - DNA, 300 bp, synthetic construct
  source 1..300: mol_type = other DNA
gctgagcggcagaaaggcagacggggactgggaaaggcgctgtcggtgacatcacggatagggcgacttctatgtagatgagccagcgcaggggctgctgcttcgccacatgctgcttcgccacgaaggagttcccgtgccgtgggagcgggttcaggaccgctggtcggacctgagagtcccagctgtgtgtcagggctaggagggctgggggggaggggggtgtgcgcggggcaagtgaccgtgcgtgtaaagggtgaagcgtgtgaggctgccggcggggcggaggtgcaataactc

SEQ ID NO: 464 - DNA, 300 bp, synthetic construct
  source 1..300: mol_type = other DNA
cagagatatagaacagacactaaaaggacagtccataaaaggacaaatagataatttggacttcatcaagaataaaaggttttgctctgtgaatgaccttgttaagaagagcaaaagacaagccacagactgggagaagatatttgcagatcatgtatccaccaaaggagcactacctaaacatgtaaagaactctcaaaaatcaacaataaaaaacaaacaggctgagcaggaaactggaaagagacatgaagagacatttcactgaggaggatccatagaaggaaaacaagcacatat

SEQ ID NO: 465 - DNA, 300 bp, synthetic construct
  source 1..300: mol_type = other DNA
gctgagtggcggagggtgggatggaaaagctgactgggacggggaaggcgctgtcagtgacatcagggatagggcgacttctatgtagatgaggcagcgcaggggctgctgcttcgtcaccggcggcttcgccacgaaggagttcccgtgctgtgggagggagtccaggaccgctggtcggacctgagagtcctagctgtgtatcagggctaggaggcctcgagggtgcgcggggcaagtgaccgtgcgtgtaaagggtgaggcgtatgaggctgtggcggggcggaagcgtgcagactc

SEQ ID NO: 466 - DNA, 300 bp, synthetic construct
  source 1..300: mol_type = other DNA
gccgaatggccttccccccgtcctgcccctcgtccactgtaagctcaggggggagcgggacccagggaggtgaagtgcacagactcggcagaggcggcgggcagaaccgcgggggtgagagggcgcggtggctgtggggcgggagccgctgctgaaaggaggcctgggttgttgggagggtgactgtccgtggaatctttggcggagggtggtttggaagaatggcgaggggagagcagaggagaaggtggtgaccctgatcgtcggccaggggagagtaggctgtgctgtccctcctct

SEQ ID NO: 467 - DNA, 300 bp, synthetic construct
  source 1..300: mol_type = other DNA
gctgagtggcggagggtggggcagaaaagcagaccgggacgaggaaggcgctgtcggtgacatcacggatagggcgacttctatgtagatgaggcagcgcaggggctgctgcttcgccactggctgtttcaccacgaaggagctcccgtgccgtgggagcgggttcaggaccgctggtcggacctgagggtcccagctgtgtgtcagggctaggaaggctcgggggtgcgcggggcaagtgaccatgtgtgtaaagggtgaggtatatggagctgtgacagggcagaagtgtgtgaagtc

SEQ ID NO: 468 - DNA, 300 bp, synthetic construct
  source 1..300: mol_type = other DNA
gctgagtggcagaaggtggggcggaaaagcagagccggacgggaaaggcgctgtcagtgacatcacggatagggcgacttctatgtagatgaggcagcacaggggctgctgcttcgccaccggctgcttcgctacgaaggagttcccgtgctgtgggagcaagtccaggaccgctgttcagacctgaaagtcccagctgtgtgtcaaggctggaagggctccggggtgcgcggggcaagtgaccgtgtgtaaaaagggtgaggcgtgtggagcagtagcaagacggaaacgtgtgaactc

SEQ ID NO: 469 - DNA, 300 bp, synthetic construct
  source 1..300: mol_type = other DNA
cagagggtggggcagaagagcagagccggaccgggaaaggtgctgtcggtgacatcacggatagggcgattcctgtgtagatgaggcatctcaggggctgctgcttcgccacggaggatttctcctgctgtgggagcaagtccaggaccgccggttggacgtgatagtcccagctgtgtgtcagggctaggagggctgggggtgggggtggggggcggtggggggttgcgcgtgggaagtgaccgtgcgtgtaaggggtgaggcgtatggagctgtggcagggcggaggcgtatgatctc

SEQ ID NO: 470 - DNA, 300 bp, synthetic construct
  source 1..300: mol_type = other DNA
actatacaaatctaatttaataatctccagaacattaagaaaggtattgtcggtgacatcatcgatagggcatttctatgtagatgaggtagcacagggctgcttcttcaccatggaggatttcccgtgctgtaggagcaagtccaggactgctgggtggacgtgagagtcccagctgtgtgttagggctaggagggctcagggtggttggggattggtgggggtggttctcagagcaagtgaccatgcgtgtaaaggtgaggcgtatggagctgtggtggggcagaggtatgtggactg

SEQ ID NO: 471 - DNA, 300 bp, synthetic construct
  source 1..300: mol_type = other DNA
ggttcaggcagcgggttggtcggctgactggcagaaaggcagatggggcctgggaaaggcactgtcggtgacatcacggatagggcgacttctatgtagatgaggcagcgcaggagctgctgcttccccacctgctgcttcgcctcgaaggagttcccgagccttgggagcgggctcaggaccgctggtccggccggagagtcccagctgtgtgtcagggctaggagggctggggggtgcgcggggcaagcgaccgtgcgtgtaaagggtgaggcgtacggggcggaggtgcaggagctc

SEQ ID NO: 472 - DNA, 300 bp, synthetic construct
  source 1..300: mol_type = other DNA
taccaaagatgatgaaaataagtatatgtacaaaatattttagtatttatgtgcctgtaaatacaaaaggagcaataaaagtgatttcatttcagaaggtgaacattttgaaagaaataatattcatgtaaattctgaactaaaatagaatgaaataaaattctgaaataagataaaaatagaatgttagcattataggaaactatagagattatttgagctaatcttctcattttatgtatatggaagctgagaagtgacatatccatagtcatacagctaataaataatcaggatgga

SEQ ID NO: 473 - DNA, 300 bp, synthetic construct
  source 1..300: mol_type = other DNA
gggtttggaagaaccccgcgtccactgtaagctcaggggagagcgggagccagggaggtgaagtgcacagactggacagaggcggcgggcagaaccgcgggggtgagagggcgcgtggttgcggggcgggagccactgctgaaaggcggcctgcgttgtcgtgtggggtgactgtcggtggaatctttggcagagagtggtttggaagaatggcgaagggggcagtgggtagggtggtgaccctgagcgtccgaccagggcgaggacgctgtgctgtccctgcagggcatgcgctcattc

SEQ ID NO: 474 - DNA, 300 bp, synthetic construct
  source 1..300: mol_type = other DNA
gggcgcggtggctcacgcctgtaatccctgcactttgggaggccgaggtgggcggatcacgaggtcaggagatcaagaccatcctggctaacatggtgaaaccccgtctctactaaaaaatatgacaaaaattagccgggcgtgctgtcgggcgcctgtagtctcagctactctggaggctgaggcaggagaatggcgtgaaccccggaggcggagcttgtagtaagccgagatcttgccactgcactgcagcctgggcgacagagcaagactccgtctcaaaaaaaaaaatttttttta

SEQ ID NO: 475 - DNA, 300 bp, synthetic construct
  source 1..300: mol_type = other DNA
atttgtcagattagattataaaagcaatatctaactgtatactgcctaaaagaaatccttttaaatatagacaaaaataggttaaagctaaagggatagaaaaaatgtaccatgctaatgctaatcaaaataaagttggaatcgctatactaatactaataatgtagatttcagagcaaagaatattgcccgggataaaaaagaatcatttcataatgataaagaggtcaattcatcaagaagacataataactctaaacacttatgtacccaataacagagattcaaagtacgtgaagc

SEQ ID NO: 476 - DNA, 300 bp, synthetic construct
  source 1..300: mol_type = other DNA
aatcttaccacattctcatagtaaacgcacaggaaagatcccctgtggctctagcaggatggagggaagaggggagactaatcatataatccagaacattctccagaaaaaggcctagtctccagggaaaaagacttccagagacttatcctatccatgacaactccagtcccattcactcttgctagctcatgtaagggtggaaaaaagctaagagacatttgtgaaagtcatggtccagggacatcattatacaaaagactgaaatttaattataagattatagaaattcttcttccc

SEQ ID NO: 477 - DNA, 300 bp, synthetic construct
  source 1..300: mol_type = other DNA
gtgtctcttattcctccattagtacaactaatctagagttgactatatattgaaatactttgtactacttaaaactaccagtgctcaacttctgtgccaaaatttctgctatctggagctaagttgggcctaactgtagccgttctcatggctgaaactaaattgtcatcctttgcttaaatctctgtggctccggtgtatccacatatgatggaaaaagattttgccctgaattagtatttatttcctaaaagaagccgtaaaaggaagtaatgatcaagtctttttaaaatggaatat

SEQ ID NO: 478 - DNA, 300 bp, synthetic construct
  source 1..300: mol_type = other DNA
atggcctctacttcgccccctagtggtagcaccaaaggcacccggtgaataacaaggtgtggaatctcaaggtgatgactcaacatctcatttgcatacccatagtaccctgcacatagtaaattatttaaagcttaaaagaatatttcttttgactcaacatttctaactatgggaagattaaagaattctttttgtgcaaactgtaggcagtaattctttttgtgcgaactgtaggcaccatcggcgtactaggagttgcggttactgcaacaatgagttgaactaatttgtagcatt

SEQ ID NO: 479 - DNA, 300 bp, synthetic construct
  source 1..300: mol_type = other DNA
gcagtatgtagcatttgattggctcttttcacagaaatatgcatttaaggtttctccatgtctttttatggcttgatagctcatttatttttagcactgaataatattccattgtgtggatgtacaacagtttattcattcacctactaaagggcacttggctgcttctaagttttggcaatgatgaataaagctgctataaacatccatgtgtaggtttttgtgtagataggagttttcagctcatttaggtaaataccaaggagtataaccgcttgattggatggtaagaatatgttt

SEQ ID NO: 480 - DNA, 300 bp, synthetic construct
  source 1..300: mol_type = other DNA
catcctcctgtcacctacgaaagttctatcttaccacctttgaattacagtttcacaaacaactacagttttctccaaaagtattctgataattgaaatgttctgtcttattaaaatagcatgaagcatgttcttgtaagttttggagactgaaaaacagaatcagttatctgtcttcagcagcaaaatgtcaaataaattaaattgataaacatcattgacttttacaaagcccacctgtacaatgctgtgtaatgtctggaactccagtgatattctttcctttaaaagttggagcct

SEQ ID NO: 481 - DNA, 300 bp, synthetic construct
  source 1..300: mol_type = other DNA
aaacaattctttcttccaccaatagatatttccccttgaggccagtaacctgattatgtattccttttggaccccataataagcaggacctacttcaccagttcagctcagtatatgtctcatctccatggggcactccccagtgggcaatttggtctcacaagtgagttcttggccatccccaacaggagatgaattctcaggggagctcagcgggatgccatcgaatctttgtctgatcaatttccattgttctgattttacccacctcaacagccttcacatcctgagcaagctggc

SEQ ID NO: 482 - DNA, 300 bp, synthetic construct
  source 1..300: mol_type = other DNA
cagaacagcgacacgtctgttttatgttttattcagatcactgtgactacacgttgggaacatagttacagaggcaaagaccaggaaggatgtcattgcaatcatctagatgacaaataaaggcagcttggaccaggccagtagccatgggaggaggagcactggagatagatgatatagatctaggtgtagatataggtagatatcgatgatagatatcgatgatatagatagatatagatgatagagataaatctatatgtgggtgtatttttaaaattgtgataaagtccatataac

SEQ ID NO: 483 - DNA, 300 bp, synthetic construct
  source 1..300: mol_type = other DNA
acagtgcattaataattaattagtgcttaatcaggagctctacatagcagttcattacccaaggacactccccattataactgtagcaaatgggtctgggcaggcagccctgccagcctcttttgaggctcaccagtgactttgaggctccccttccagggctgaggtcactaacctcccctagacctggcgaccagtagctggtgtaagaggtccccaagaacaggggtgatctgactcaccctggagaaatttaagacacgctgggaaggcagagcccttgcttaaaaataactcctc

SEQ ID NO: 484 - DNA, 300 bp, synthetic construct
  source 1..300: mol_type = other DNA
ctgaccaggcgcagtagctcatgcctgtaatctcggcaccttgggaggccgaggcaggcggatcacatgaggtcaggagttcgagaccagcctggccaatgtggtgaaaccccgtctctactaaaaatacaaaattagctgggcaatggtgatgtgcacctgtagtcccagctactcgggaggctgaagcaggagaatcgcttgagcccaagaggtggaggttgcagtgagccgagattgcgccactgcactccagcctgggcaacagagcaagactgtctcaaaaaaaaaagtaaaagg

SEQ ID NO: 485 - DNA, 300 bp, synthetic construct
  source 1..300: mol_type = other DNA
caccctcttccactgagtggccctttcaacccttacaaagccggagagctcaagttctgggccctgtggccttggtgagcaacaccctggaccgatcagaacgacccagtgagttgggaaaacgctccttttaccgataaacttgaagcaactcatgactgtggctctggcaccacctcagcggaggcggaagtgccatagaacttttaaaaaatatatttaccaagaattaaaaccaggtgaaatagtcttgtatttggtagtttaagggaaagcaattggctggattaaaatgtattc

SEQ ID NO: 486 - DNA, 300 bp, synthetic construct
  source 1..300: mol_type = other DNA
tcaatgaaccacataaaattgtgatacataacaaatattactcaaaaaaaaggccaaaatagtatgatgtgggatttaaaaaatgtattctaatttttaggagtataactagcttaatccaagtaattaatacaaccactaataaacgaatttctaagccaagacactgctatccaaaaaagtagataaatgtactatacactttagcaaagtacacatttgtgttaaggctcccatcttctacattctaaaaaagaaaaaaaattattcacgaggagaattttaaaagtggagagttca

SEQ ID NO: 487 - DNA, 300 bp, synthetic construct
  source 1..300: mol_type = other DNA
caattatttggacaatgatatagaaatgatccttatcaaatttctcagttgatgagctaggagaaacaatgaacatgttagataactgaatcaagatccaaaaacactttgacaaactaaatatagcagactgctgaggaaatgagtggtgatacactgggtgctttttttgttcagtaagagctggaggcaaaaggtcacaggtcgatagatgccgtcatgaggaagggtcctatggattaccagtagctttggtgatggccagatcaaatggaattgcctgaagcattaaaaaaaaaa

SEQ ID NO: 488 - DNA, 300 bp, synthetic construct
  source 1..300: mol_type = other DNA
tcttctttctactttccattcacgtgggcatcttccttcccagggtttcgaaagcccctcacgtcctccctgtcatttcataatcctgctcacagagcactttttccatcttcctcaaacagtccaatcttggcccgggagaagggttcagggacacaggcttcctgtgggcagaaattttattctaaaatttctacaataaacatgtttatttttacaatcacaataaattttaaaactttaaacaaggaaatgtgtaaagaaaagggaaaatgggaggggtacacaaagtttatgctc

SEQ ID NO: 489 - DNA, 300 bp, synthetic construct
  source 1..300: mol_type = other DNA
agctttcaaaccagcttccccagggcgctgtgcagggcccggccccttggtggccacgcctcccgggcgcagagcgggtgggacatgcaaatgaacggccctcgcgaccaaggaaaaggggcgacaaagctcgaagtcactaagagtcaaggagcggacaaaatgtctcaaagggcctatgttttcaatataatatttacatcagaaagcaggtgagatgtttaccgaaggtgaggtttctcaccgtgaccttaaggtggatgaaagaagggaggacgtgggaggccccgggtaactggt

SEQ ID NO: 490 - DNA, 300 bp, synthetic construct
  source 1..300: mol_type = other DNA
gttgcaaggatttaatataacttatgtaaagtgggcagaagtgctccgcaggcacagagcaggtgctcaataaatgccaggaccaaaataccacgaaactgtaatttttataaggaaaaggatcttttcttcagtgctcaacgaggaaatattatggggccgtgcgcaatagctgacgcctgtaatcccaacgctttggaaagactaagcgggaggatcgcttaagctcaggagttcgaggctagcccggggaacatagcgagatcccttctctacaaaaaaaattttttttaattagct

SEQ ID NO: 491 - DNA, 300 bp, synthetic construct
  source 1..300: mol_type = other DNA
ccagtgtgttaagaactgcaaggaccactggaaatacaaacacagttaagacagtaacgcactttgaattaaaaggcaaggagatgttattacaaatgaacatctaaattattgatatctctataaaattgaggttgtagtacgatgttcagtcttggcctgtgtacgttttggaccagataattggttgtagggtagaagaaagagcgtcctgtgcattaccgggtgtttagcagcaggccggactctacacacttaatgttagtggccccctgatttgcgacaaacaaaaatgcctct

SEQ ID NO: 492 - DNA, 300 bp, synthetic construct
  source 1..300: mol_type = other DNA
ttcagattttggaatacttgcattatgcttaccagttgagggtctcaaatttgaaaatccaaagtctgaaatgctccagtgagcatttcctttaagcatcaggtgggagctcaaaaagtttcagattttgcagcatttcagattttcagatttggtctgatcgacctgtactaatagcagtcaaaatgaaatgtaaggcaaaaaacataactaaacataaaaagggccatttcacaaaatgttcatttccccagcaagataataattttacatttctatgcattaacatattatagaaag

SEQ ID NO: 493 - DNA, 300 bp, synthetic construct
  source 1..300: mol_type = other DNA
gtcactaaccaatgcttttacgaatacagtaaaataaattactagaaaaatgaagtattaaaaaagatcaagaaagtaagatcaatgttaattttcactctaagaatcactagattttatcaaatagctatgaaagtttctaaacactctccatttccatacttaacacagtctggaagcaaaagtttcagaggatgatacaaggtcacagactacattttaagtagatttggtctaaaagaccacttctaattttgaggacacagacttttagtacagctctttaagaatagttatttg

SEQ ID NO: 494 - DNA, 300 bp, synthetic construct
  source 1..300: mol_type = other DNA
aaagaagtttaattgactcacagttccacatggctggggaggcctcacaatcatgatggaagacaaaggaggagcaaagtcacgttttacatggtggcaggcaagggagcttgtgtaggaactcccttttataaaaccataaaatctcatgagacttactcactatcacaagaacagcatgggaaagacccacccccatgattcagttacctcccactgggtccctctcacaacacatgggaattatgggagctacaattcaagatgagatttgggtgcagacacagccaaatcatatca

SEQ ID NO: 495 - DNA, 300 bp, synthetic construct
  source 1..300: mol_type = other DNA
ttgacatgattcccagagttgtcccttgactcccaaaggggttcagaaaatatgggagctggaaggattgagctgaccacttaggtttatgagtgtgaatacacaaaatagatgtttgggtcaggcctcaggaataagatactgagactgattatgttcagtgagaaagatgtttccttgggagcattacatcaggtcagagcagtatcagggaaagtttgagagcactggagagctgtagggagctgaggtgtcagcctccacctcaactgagaaataggagaggtgtggcgtaagtag

SEQ ID NO: 496 - DNA, 300 bp, synthetic construct
  source 1..300: mol_type = other DNA
gcacatgtatcccggaacttaaagtatattaataataaaaaaagagattaagtaaaaaaaaaaaaaaaaaaagaaaagaaaaggagaggtaggtgagagagagagagaggaaagaaagctagtatttgtagttatcctattctaaaaaactactattcaactaagacaactaagaaaaatatattccaataaaaaattttaaaattacattatgagggtgaacatgactatttaaacaatctgtactttaattaattaattaagaacccagattagtaaaaaaaatttttaaatccagat

SEQ ID NO: 497 - DNA, 300 bp, synthetic construct
  source 1..300: mol_type = other DNA
cccacagcagtaaagaataattacgcagttattcttctggttatgttttaatttcaaaaagttaagtgtgattttcctttttgctgggatttctgtcttgagcaaataattattcttatgaaagtatcaattgcagttactggttaaaaatgtaagacctaggaaatttaagtgttgtttctattttaaggtatatacataatttataaccatttacttctagagaaaatcctgaatggttagtaatatcaaaacattttcaacaagaaaactaaaatgaaaagaaagtttaaaaattac

SEQ ID NO: 498 - DNA, 300 bp, synthetic construct
  source 1..300: mol_type = other DNA
agtatgttctgatgaacataatctctagaaagaatactacagatcttcaagcataagatagaactgtatgtattgacctggaaagccatgataaatatgaggaaacaaatctgaaagaataaattccaaattgttagcagtgtttactaggaggagatttgggagcactctgcctatagtctccagaaaaccagcaaacaagttcctgccaaaagctatataatttctcgaagtttaattaggttttaattaaatatacttaaatctttgtaatcatttctctacctgaagaattactgt

SEQ ID NO: 499 - DNA, 300 bp, synthetic construct
  source 1..300: mol_type = other DNA
cagcacgcagccagggctcaaacccctgccctccactgcctccttcacaggtgttcctttgggaacctccttgattcaccgctcagtttacatggccagctttatttgtccctggatgtcacctgacacccgtccatgaacacttttcatttgcagtcagcatgcgtggccagcacattccagcccctcctaccctgtctcctattttgtgctatttcccaaaggccttctgtttcctgtggtgcagaggccagcagcagcccgggaaaacgcacctgcaggtgactgtaaagagttcag

SEQ ID NO: 500 - DNA, 300 bp, synthetic construct
  source 1..300: mol_type = other DNA
cccagcactttttgggtatctctcctatgtcataggagagacattacatctatgtaatagatgtaatgatgttgtacaaggctgagcaacctcagccttgctctaaaattatttacatcatagtttaccattctttgagggtggcactttgcatttcatagaataattgaacatttagagaattaattgaatgaatgcatggatgcagagttggatggaggaatggatacatgatggtagatgaatgaatggatggatgaagggacgattggtccaggaggaaatagaaaaataattgca

SEQ ID NO: 501 - DNA, 300 bp, synthetic construct
  source 1..300: mol_type = other DNA
caaagacaccccaggggactctagctcctgtggttgaatcacccctgctgaggccccaaatatcatggaacactgagtctgaataacccacagaatccatgagcaaaataaaatgattatttcacagccccaagttttggagtcatttgttacagagctagagtaactgggacatcatctctcagtaaacagaatcacgaatctgaatgagaaccccaagtgaaaaaccagccaggggtttaaacacactgggaacaatgtggtccctgaagcagaagatgaagttaaaatcccagctct

SEQ ID NO: 502 - DNA, 300 bp, synthetic construct
  source 1..300: mol_type = other DNA
tagcttgatttgaaattggaacaggctgaaaataagaagaaaagccaaaatatatgtctctggattttttttatcttgttcaattaatttatttcaaatgaagaaagccagtttccatccagttacaatcatgaattcctcagagtttattgttaggtcaatatttagaaacagcattacattttctcacagaaacaatgaacaataatgattatgtttgcttccaggctagctcacagaagcctatattcctctaattgtaatgaaaacacatctttgtattgaaaatagtagaaaatt

SEQ ID NO: 503 - DNA, 300 bp, synthetic construct
  source 1..300: mol_type = other DNA
gcaagcttccagggcctgccaagtgccttttgcagggtcagttctcctgagggctggtagggtggggctgagtggatagagctgagactgcaagagagaagacaggaagtgctgggcacaggctgtggtcagaggccggcgatcaggcaagggactctgaggtgtccacaaattctcagtttgagcctggccccaaaggttgtgatgaaggcacatatttggtcaagttaggaggataaaatctatttttgttttgcagtttgcattttcagcttgatttctagctgaaatatctagaca

SEQ ID NO: 504 - DNA, 300 bp, synthetic construct
  source 1..300: mol_type = other DNA
tcactctgggcaagtggacaatgacacacacctcctgggttgttctgcaggggtaaaatgaaaagatgcctgtgacacaggcattatttttccactgtatacagaccaggggattatcacattgtggtgagatttctttttattttcttttaatccatgactgaaaagtggtatggaattaagaaggaaaggtaaaagcaaaaaacataaaatttaaaaaataatagtcgtcattattaacgaggacttctaaagcaagtttctagcctttttcctttttctagatcagaatttgctcct

SEQ ID NO: 505 - DNA, 300 bp, synthetic construct
  source 1..300: mol_type = other DNA
ttgagaaaatcttaacctatttcatggagacatactttccagaattaacaagatgaccaattaaaaacaaatagccctcctttagtccatggttgccttaaacaatatattatgtattaatttctttctaatgactgtgcatagcttattgtgtggtatatgggctttgttatatttattactgtcattattttccttattttcctatcaaaactagcctttcagtgaatatctttctaacatacatcactttatactagtcagataaatataaaactcaggtgaagagtggacagtatg

SEQ ID NO: 506 - DNA, 300 bp, synthetic construct
  source 1..300: mol_type = other DNA
ttttggttattagaatattttaccatattcttacataaagtaagtagagaaaaggaaatgttattaagaaaaaccataagaaagataatatatatatatatatttattattcactaagtggaagttgatcatcatgaggatcttcatcctcattgtcttcacattgagtaggctgaggaggaggaagaagagcaggggttagtcttattgtctcaggggtcatggttaccctgcaagtttcttcaaactgttgtaaatctccaaaaaaaattggtatatttattttaaaaaatccatgca

SEQ ID NO: 507 - DNA, 300 bp, synthetic construct
  source 1..300: mol_type = other DNA
tgcactccagccagggtgatagagcgagactcagtctcaataaataaataaataaataaataaataaataaataaataaatggtttcaattaagtagctataatgaatattattcttaaaccatgccattctggaaaaagattgaaacaatggaacagggtcattcaggaagcttctgtgatacccctctatagactcatagatcaaaaaaaaaaaaaaaaaaaccacaagacccttttccttttctgaataaaggccactcaacgctggtattctgggaattgtccagatgaggatgca

SEQ ID NO: 508 - DNA, 300 bp, synthetic construct
  source 1..300: mol_type = other DNA
ctctagctgggaggcagccataagtggtctaccttgaatcctgctccagtgccaacaggctgctgggcttttctggaataaattggagatcccctccccacctgatcatggggtggcattagggtcctggagaagggctatagagaagcccagcctggtcccaggtcccacacagagcttctctgacccagcacccatgattgggaaggtctccatgttctgaactgggggtccatattctgaaaggtgggcatgcgcggcatcaccattgctggggctgccgtcaaaacacatagtgct

SEQ ID NO: 509 - DNA, 300 bp, synthetic construct
  source 1..300: mol_type = other DNA
gcgtgtgtccccccgtgcatgcggggaaggagcagtgggggaaggctgagttgggctttcaattaaaaaaaatgtgcatacacttagttttttgatgcaaaattgccaaaggcgtgtaccgtgaaaacctacctcgacacctgccccctgcctcctgttccctttccggaagcgcctgccttacaccggtgtgttcctctagagatggccaggacctgggtgaggcagcacacactcacaggaccttcccaacactcattatgaaacatatcacatggaaaactgcaagaattacaggca

SEQ ID NO: 510 - DNA, 300 bp, synthetic construct
  source 1..300: mol_type = other DNA
gccaggtgcagtggctcacacctgtaatcccagcactttgggaggcaaaatgggtggattacctgaggtcaggagtttgagaccagcctggccaacgtggcgaaaccccatctctactaaaaaaacagaaattagttggatgtggtggcacacacctgtaatcccagctacttgggaggctgaggcacgagaatcacttgaacctgggagacagaggttgcagtgagccaagactgagccactgcactccagcctggctgatagagtgagactctgtctcataaaaaagaaaaacaatta

SEQ ID NO: 511 - DNA, 300 bp, synthetic construct
  source 1..300: mol_type = other DNA
attcacctgcctcagcttcccgagtaactggaattacaggcatgtgccaatacgcccagctaattttgtatttttagtagaggggggtaattagcttattttttgtatataatgaagtgtctgcagacagccacaccctgggctggtataatgaggggttttttgtagtcattagagacccagactccttatatctttgcctccaccacgctagtatgtgttcttgccctcatggtcatatctcaccttccttcctggctagatgaggagaaagactggagagtgagaaagacattgacc

SEQ ID NO: 512 - DNA, 300 bp, synthetic construct
  source 1..300: mol_type = other DNA
tcctttaatttatattaactttccaactaccttaatgtttgctagtcaagtccatgcacatcttaccctcgaatgctcttacatgtgtgtagacctaactgtcctattagatcccctgtctattagatacccagaggcatgacccagccaggtcactcaagagtggctcagcaactcagcagacaggatgtggtcaaggggatggtcaggtccctggttccacctctgtggtcagcaacaaggaaggtgtctgatcagagagaaagagtcagaaaagcaagaagcaaatgtattataata

SEQ ID NO: 513 - DNA, 300 bp, synthetic construct
  source 1..300: mol_type = other DNA
ctattcaacacagtattggaagttctggccagggaaatcaggcaagaaaaagaaatgaagtgtattcaagtaggaagagagggagtcaaattgtctctgtttgcagatgacatgattgtatatttagaaaaccccattgtctcagcccaaaatcttgtaagctgataaggaacttcagcgaagtctcaggatacaaaaccaatgtgcaaaagtcacaagcaattctatacaccagattcctctatttcaaagtcttgaaataagtgccctagaagcagactgatcaaagagacacagccc

SEQ ID NO: 514 - DNA, 300 bp, synthetic construct
  source 1..300: mol_type = other DNA
tgaacctgggttttgagccctctcttgtaaaatgggcacagtaatattacctacctcagggagttgtgaggattaaacatgaagtgctaagcatagtgcctggtacaaagacagtactcaataagtgctacctaaaactagtattcatagcaatactgttaggataaagaattatcatatatgagatagttccaaatttttgtttttttaaaaaaaaaagagttttataagttcaagataatattttcttacttcaaagaaacaatctcacaacgagggaatggtaagaatcaggagaga

SEQ ID NO: 515 - DNA, 300 bp, synthetic construct
  source 1..300: mol_type = other DNA
agcgaaacctcatatctactaaaaattagcagggcgtggtggcatgtgcctgaaatcccagctactcaggaggcagaggcaggagaatcgctggaacctgagaggcagaggttgcagtgagctgagatcacaccaatgcactatagcctgggcgaccgggtgagactatctccaataaataaatgaattaattaattaaaataattttaaataaagaagacagcatttttaacctgaattgaggaaattaaacagatatcaggaagaaatgtaagacgaaacagaaaatgcctgcagttt

SEQ ID NO: 516 - DNA, 300 bp, synthetic construct
  source 1..300: mol_type = other DNA
aaaggaggccatttaaaaatatgagtgggaaaaaggaacaagatatatacataaatcattctggtacagaataaaaaatagtgatggaagagaagtaactcatcagttttggaatcattagtgagcggatcatcagtgttcttggtagagaatattttcagactaagagtatcagggaagactgtaagaaggagatggatctagaggaaaatataagatttgaatttgtagatacttgtggtaggtagtggtttgatgaggtcaagatattccagcaatgactatgtaagcaaaggtaag

SEQ ID NO: 517 - DNA, 300 bp, synthetic construct
  source 1..300: mol_type = other DNA
gtgcagtgacataatctcagctcacaggaacctccgcctcccaggttcaaatgattctcctgcctcagcctcccaagtagctggaattacgggcgtctgacaccacactcaggtaatttttgtatgtttagtagagacggggttttgccacattggctaggctggccttgaactcctggcctcaagtgatctgcccgcctgaacctcccaaagtgctgagattacaggtgtgagccaccgtgcccggccagaaacagttgtgttttttttttttttttttttcttttttaaagaagaaca

SEQ ID NO: 518 - DNA, 300 bp, synthetic construct
  source 1..300: mol_type = other DNA
ttcatagaacattttccaaaatggattatgttttaagtcacaagaaacactcaataagtttaaaagatattttaaaagattatagaagctgacaacaatgaaagaaaatatgagtgaatagaattatcctaaatacctcctgagtcaaagaggaaatcaaaactagaaccaccagctatttggaaaatactgagcagaagaacattgtccatgtaaattagaatgtgcagccaacgctgcattcaaaagcaaattaagaacattaaaggtttttattattaaaagacattaaaatgaact

SEQ ID NO: 519 - DNA, 300 bp, synthetic construct
  source 1..300: mol_type = other DNA
aatcccagcactttgggaggccgaggcaggcggatcacctgaggtcaggagttggagaccagcctggccaacatggtgaaaccctgtctttactaaaaatacaaaaattagctgggtgtggtggcactagcctgtagtcccagctactcaggaggccaggaggctgaggcaggagatttgcttgaaccctggaggaggaggctacagtgagccgagatcacaccactgcactccagcctgggcgacagagacagactccatctcaaaaaaaaaaaaaagaaagaaagaaacaaacggtgt

SEQ ID NO: 520 - DNA, 300 bp, synthetic construct
  source 1..300: mol_type = other DNA
cctgagtttcctcatcttgttgccagaggccaggaggccctgcgggattggagtagaggaggctactaatttggtgactggcataggaggatggatgggaggcagcacaggaaattagacagccctgtacattgctgctgcgatagaccatcagccatgtaacccaaggccaatccagtgggactgggccccggatggcaccaataaaaaaatcctaaacgcacatgactgtttgctgacaattacaatttcatgagggtaaaatccatgtgtggttaccactataaaaactcacactct

SEQ ID NO: 521 - DNA, 300 bp, synthetic construct
  source 1..300: mol_type = other DNA
cagaacttaaagttaaaaaaaaaatcctagtgcatgtgtatatttaaaagccagtttgatttttgttttctgtgttttatggacaaaaagactaacacaatcccattttacacgtgaaacctcttaagcttacaatgggaaataatttgcccaaggttacctaactagttagttgtggaacaggcttagaatcatacttcaactttgtgtccttaaccacaccattctattcaggcactgtgatagaattctctctcagtacccacgactgaagagtaaggtagcaaaagtgtagattgg

SEQ ID NO: 522 - DNA, 300 bp, synthetic construct
  source 1..300: mol_type = other DNA
tttatttatgtagtcattcttttaatgtgtaatcttgctctagtagttaaaactccagttttcccccttcttatccaagagaattagagtatctttcaaaaagtatttacatagatgtttgatatcattcgtgatgttttttatattaatgaagcaaattcttcagttttgcctgaagttctgccttgtctcctgggcacagaatttattcttttgagaatttcctcaattaatatgagaatggtatctgatgttttgtctccaagatagcctatacaaccagggaataggttaatactc

SEQ ID NO: 523 - DNA, 300 bp, synthetic construct
  source 1..300: mol_type = other DNA
aaccatcatgtcctcagagtaattagataaccttttgcacccaaagttccacaagtggacatatatgaaaacagaatttagaaatcaagtaattaaaatatggtgaattataaataaaatagaatgtttcttcaattactaaaagattaaatttatgtaatataatagaaaatataacaaaaagtcaaaatacaaaaaataggaaaacaaaaaatttttaaaggagagatcaagccaagtattcaacaggtgtctcataatgtttccaaaagagaagaaataaaataaagaaatttgaag

SEQ ID NO: 524 - DNA, 300 bp, synthetic construct
  source 1..300: mol_type = other DNA
ttcgtgaatggggctcaggaagctatttttaacagctatcccatgtaagttgaaatacatttgttctttgggctaatatccaaattttttaaccttaatgataataatcaataacttgtttctagaatactttttgaagtctttatgcaccaccccctaaacatatacatgctttaatgatatgaaaccattctctctaaataccaaattttccagacttcactgattttcttaatcttttatttccagttaaagtatactgcctgttaattgctgcctatcccgctcatgtatggtttg

SEQ ID NO: 525 - DNA, 300 bp, synthetic construct
  source 1..300: mol_type = other DNA
gttttttaatatataacaaatataaatatgtctggtgcagtggctcatgcttgtaatcctagcactttgggaggccaaggcagaagaattgcttgaactcatgagttcgagaccagactgagcaacatgaaaaaaaacccatttctacaaaaaatagaaaaattgactgcgcttggtgcagtgtgcatgtagtcccagctacttgggaggctgaggtgggaggatcacctgagcccagaggttgaggctgcagtgagctgtgattgtgccactgcactcccagtgacagagtgagactct

SEQ ID NO: 526 - DNA, 300 bp, synthetic construct
  source 1..300: mol_type = other DNA
tttctgcaagtcattttatctttacctgctatttctctcctttactgaggcttagcgttttgaaataaaaccagacagttttctaggcaagttcaatgtccatccttacaacagacttcaccttgaagaggaaagtacagacctggctaatatgagaggagggaaagggaaaaataaatgaagataaaagttaaatattttaaaatatttttgttctcatttttttttctttttgccttaaatacttggaagccaagattcgaatttcatgctcagtacccacagagtaagaatattttc

SEQ ID NO: 527 - DNA, 300 bp, synthetic construct
  source 1..300: mol_type = other DNA
tgaagttcaataaaattaggtatgtctatagtaaaataactaggaagtgagttttgagtatttattattgagctttatttaacagattttaatataattgtcagtttctataatttttaataatggctgtgtttaacaatcagcctgcaaaattcctacaatttttaaattgacccttgtaagctgttacaagccagttctatcacactactgcctatactcttaattgtggaagtgacttagggactagtcaatatgagttgaggtggttctgctagctaataatttaaaaaatagaca

SEQ ID NO: 528 - DNA, 300 bp, synthetic construct
  source 1..300: mol_type = other DNA
ctctttaattagatcacaccagtttttgtttttgttgcaattgttttaggggacttattcataaaattttgccaaattcatgtccagaatcatatttcctaggtgtttctcaagtattttcatagttttagggcttacattaaaatctttagtctatattcagttaacttttctatatggaaaaatttagaggtccagttttatttttctgcatatgactagctgattatctcagcaccattttttggatctgtgtatgaatctacaattatcttaactcttgattaaaaaagaaaactc

SEQ ID NO: 529 - DNA, 300 bp, synthetic construct
  source 1..300: mol_type = other DNA
gtgaaacatgtagtgtgtggttgcacggcagcccgagatgtcaggtgagagaaaatttaattataacagatggcattaactatataaaattcaggggctctagtttatgtatgagtaagcatggaagaattgagtgtttgcctgtattgccccagaacatgactagactatgtgagattattgtaattggtttctaatctagggccaggttagcagtttagagggttataggtacatgacagcttctcagtagttaactaataatactccctctgaatgcttttcaaaatggatgtccct

SEQ ID NO: 530 - DNA, 300 bp, synthetic construct
  source 1..300: mol_type = other DNA
atttgactaaattattttaattttacaatttaatccagaactaataattattacaatttaatccagaaaatagattattttagcacttgactcataattacatgaaattaaaagaatgtatgtgtatatatacatatattaatgtgtaaacatatatatacacatatacatataaacatacatatttttatatgccattttattgcattttgcagatattgtattttttgcaagttggaggtttatggcaaccctgcattgaacagttctgccagtgccgtattgccaaaaatatgcact

SEQ ID NO: 531 - DNA, 300 bp, synthetic construct
  source 1..300: mol_type = other DNA
tggtatttagtgggatgagaggtgcagtagaaattatggactggcttttcagctcctgttccaacccatttatggaatcactttctgaactacagctagaatgcctgtttgaactgcagaggcagagaagaaagagaagaaagaaaggacaagagagatgaaagggaaggaaggaagggagggagggagggaaggaaagaaagatggatgaaaattacacttcccagcctcttgtagctaaggtctgactgccccccatcccctgctttgtgagtcttaggtgaagaaaatgaacagcat

SEQ ID NO: 532 - DNA, 300 bp, synthetic construct
  source 1..300: mol_type = other DNA
acttaacatcattcactttttcaaaagaattttagtgtaaaatacaacattgtattttcagtaatttgggggaaattatgattttttgacagttcaattgaattgtagtcagtagtattactgtagatgaatcgtctaaagattggtaagtaattttaatagcaatggaaaacgatgttatgtaaatacaatgctcaataggtaacaactattattcaataacagatgaagacagaaaactgttcacatacattatgatataaagagaaatggaaaaatcggttaggaacacgaacttta

SEQ ID NO: 533 - DNA, 300 bp, synthetic construct
  source 1..300: mol_type = other DNA
ttcagattcaagtctctagattcttgaggttgggaaatgtttccggagcagccatggttttgcattcattggccattcaggttttctgctttgccgtttcccccccattcaggttttctgctttgccatttccccgggggtttccttaccctcttggaagaacaaccatgcattaagtccatgttgactgtattttacctgctgtttctatgtgttttgcaataagggcttttcaaaatacccataacttgtggctaaaaatgaggtttgttccaatgtgccttagaaagatccagtttc

SEQ ID NO: 534 - DNA, 300 bp, synthetic construct
  source 1..300: mol_type = other DNA
atctaacaatggagccacaaaatacatggaggaaaaactgaaagaattagagggagaaatagacaactcaacaagaataatttgagactttggttccaactttcaataatggatacagcaactatgcagaagatcagtaaggaaatgtaagacctggataacactataaaccaactggacctcacagatatctatacacactttaatgaacaataatagaatatacattctcttcaagtgcatatgaaacattttcaaaaagagaatatacgttagaccatttttaaaaacagcttcaat

SEQ ID NO: 535 - DNA, 300 bp, synthetic construct
  source 1..300: mol_type = other DNA
caacacctcagatccaagttatttcctatccaagaacacagagagaaccaaagggaatcctgtgactgtctctctgaatttagttcacgtgggggctgtggggccaaaacattgcttcctcttaaaaagtctgacatagaaaccatttctagcttcttgatagcccaaggctttcacaagtgtcccttctttgtcacatatcaccaaagcatgtccttcaggtttactgtaaaaatatgaatgtccactttcaaatacaggtaagaactctacatgcgacttggagtgaaataattgctt

SEQ ID NO: 536 - DNA, 300 bp, synthetic construct
  source 1..300: mol_type = other DNA
tctgaggcatacatagcctctgcttgtcaaaggatgcctcaagacaataggatctagaagtgaacacagactcacaaacaagaaaatgatgcagactaacaggaccaccactcctttattaacttcaacactagccactgcaaataatgggcttaaaaccagcagaagactgatcgtgaaaggaaaataagccttaaaggacactttcaagtaaacatcagctacgtatattgaagtggctaattgctctaccatgtttcagcctattcaaaggaaaagctataatagtttcattttttt

SEQ ID NO: 537 - DNA, 300 bp, synthetic construct
  source 1..300: mol_type = other DNA
ctctactaaaaatacaaaaaattggctgggcatggtggcacatgcctgtaatcccagctactcaggaggctgaggcaggagaattgcttgaacttggaaagtggaggttgcagtgagctgatgtcgcgccgctacattccagcctaggcaacaagagcaaaactccatctcaaaaataaataaataaaaaaaaaataaaaccacttaaacacatattatataaaaagcatctgataataaacaacggcatctaggatttacactaaattagtaaaaataattattctcaattgatgagat

SEQ ID NO: 538 - DNA, 300 bp, synthetic construct
  source 1..300: mol_type = other DNA
gtgaagattgtgccactgcactcaagcctgggcaacagagcaagactctgtctcaaaaaacaaaaatggtaaaaatctttagtttttaagaggtaaggatgaagagaagtgggttaaaggatacaaacatacaattagaaggaatacattcaatgtttgatagcagagtagggtgactatagtaaacaaaatgtattgtactcaggagatgaacacactaaataccctgacttgatgacttctcatatatacttaacaaaatgttacatgtacctcatacatttatacaaatagaaaaaa

SEQ ID NO: 539 - DNA, 300 bp, synthetic construct
  source 1..300: mol_type = other DNA
tgacagtgctcagggtctaagacaggcacacaagaaacatcactactactgcatggccttctttagcagcatgtggaaatgttgcaaaccatgggaaggcttggattaaccccataaagggacaaagcaaggaaagaactggctgggattcccaacaatcttggagttcaaaggacccatggtagggctgttctggagtgttggatgggatgataattattaatagttccatctggttcctataaaaacaatcacttcaaaaacattgattattaaaagcctcatagaaaatttattttt

SEQ ID NO: 540 - DNA, 300 bp, synthetic construct
  source 1..300: mol_type = other DNA
aatttttctgcattatccagtgagaccaatataacaaaagaattttacatgttgaagaggaaggcagaagacccagagtcagagtgatgcaatgtgagaaagacttaaccagtcttttgctggctttgaaaatggaggaacagaccatgggccaaggactgcaggctgccattagaagctgaggggggaaaaaaaaaagagtggattctccacaaaggaccagagccctactaactctttgattttagtccagtgaaacccattttagacttctgcgtataagaattataagataataca

SEQ ID NO: 541 - DNA, 300 bp, synthetic construct
  source 1..300: mol_type = other DNA
tgcctcagcctcccaagtagctgggactacaggcccctgccactacacctggctaatgtttgtatttttaatagagatggggtttcaccttgttggtcaggctggttttgaactcctgacctctgctgatctacccgtctcggcctcccaaagtgctgggattacaggcgtacaggcgtgagccatggtgcctggcctatggtattttttaattatgtaaaataaagtaaaacttatgtaaaaattacttacaatttttctttaaaaatttaaagtagtagattacaaaaagacatgaag

SEQ ID NO: 542 - DNA, 300 bp, synthetic construct
  source 1..300: mol_type = other DNA
gggctgggtgtggggtctcatgcctgtaatcccagcactttgggaggctgaggcgggtggatcacaaggtcaggagttcgagaccagcctgatcaacatggcgaaaccccatttctactaaaaatacaaaaattagctgggcgtggtggcacgcacctgtaatcccagctactcaggaggctgagtcaggagaatcgcttgaatctgggaggcagaggttgcagtgagctgagaacacgccattgcactccagcctgggtgacagagcgagactctgtctcaagaaaaaaaatggagtgg

SEQ ID NO: 543 - DNA, 300 bp, synthetic construct
  source 1..300: mol_type = other DNA
cccagaaagttcattgagaaaatcactggtttagacagctaagactaatccactagtgaaatttatcatcttccttcagcatctttcaacaacatccaaaagtctatattttaaaagataaccactgccttaaataaatataattgtgtttgtattggttacattatctggtggcactgttttcagtgtaacaaatcatcaaaatgcatcctccacatatttccagggtccaattaagttgaaagattatccagtagctcttgttttcctcactacttaatagttatcaagaattctcct

SEQ ID NO: 544 - DNA, 300 bp, synthetic construct
  source 1..300: mol_type = other DNA
cagttagtaggaaagtattttctgaaagataaagatttatgtgaatttatattaagactggacagttatcttcaacctaagaatcagtctctagaatccaggatgttacctgctactcttactttttcacacatccagtacaacgaacgaacttagcagttacaaaatatttttactatgcttcttcaagaagcagaacagaccaaaagcaaggtagaaaagagagtgtactttacttaataatggtcttgtaaaagccaaaagtatatactgagttggtgagttcaaacttggaggctg

SEQ ID NO: 545 - DNA, 300 bp, synthetic construct
  source 1..300: mol_type = other DNA
caggacccctctggaatgacagtcttctgacctaatattgcacaaggataagacagagaatttctttatgtccagctcctagccagaacagtaaagaaaggttacagtaattattctagtttttatggctggctttggaaaagagaagttctagtttctatgacccaccttggggaagaggaattctggtttctatgacttgcttcaagacagaatgaagggtaagagacagcaaggcagaaaatctaagagaccttggttctgagattgcttctgaggccttctgacatcctttaattt

SEQ ID NO: 546 - DNA, 300 bp, synthetic construct
  source 1..300: mol_type = other DNA
ttcttggtcctgggtatgagccccatatcctaggtcaccaaccagattgagagcccagtcaaagttctttctcatggtgtgtctaggacgtcagaaaacctagagatgtggccggactctgagccccctgaaaagggttcccagaccttttgtgagagggaggctttgtctgcccagagcccacctagtcttggagtcttggaaggctgcccggcacctcaggtaggcctgtttgcacctcagcctcaccctggtctgggtatccactccatacagacatgtttttaaaaattgaggaat

SEQ ID NO: 547 - DNA, 300 bp, synthetic construct
  source 1..300: mol_type = other DNA
ctcatgatccacccgcctcggcctcccaaaatgctgggattacaggcatgagccaccgtgcccggcccccaaaatacatgttttttaaaaaacgatagtgagtgtaaaatggaatcataaaaatactccattaattcagaacagaaggaaaaagagggaaaaaaggaacaaagactaaatagaatacatataaaacaaatagcaagatggcagatttaaatctaaccaatgtcaataattacattaaatttcccattaaaatgcagaaagtatcagattgatttttgaaaagcaagacca

SEQ ID NO: 548 - DNA, 300 bp, synthetic construct
  source 1..300: mol_type = other DNA
ttttggtgactctaagacattttacttactactgtcacttgcaggtcagagcttgccagctcccaagagcttctctagtgccaattagctttctttcaaaacaatatataacgtttctctttctagtaaaatctccaactttctctgttcttcagacatacagaggaccaacccagtctgtgcatatgtctcgaattgcaattttgtgattcccaaataaaatgtttagagattcatctctatattttattttgactttgacagtacttaggccaaaattaggagttaaatataacagaa

SEQ ID NO: 549 - DNA, 300 bp, synthetic construct
  source 1..300: mol_type = other DNA
gggagctagagtaatatttgtaggttttacggctggctttggggaaaaaggattctggtttttatgacctgccttggggaagagagattctagtttctgtggctaaccttgagggagaatgatagatcagagacggaagggcaggaggtcagggaaaagcttctgcttctgaggctgctgctgaggccttcattttgggttatagtttctgagccccaacaatatatcaaaacatcacactctgtcaaaaatgtatacaattatgatttgtcaattaagaataatattaataataaaaaa

SEQ ID NO: 550 - DNA, 300 bp, synthetic construct
  source 1..300: mol_type = other DNA
ctcttacgtagtgctgctgggagtgtataattttacaaatacctggaaattggcaatttcctacaaagtttaacgtacgtttgccatatgacccagcaatttcactccttggaatctacctaagagacataaaaacatatgtcctcacaaagatatgtgtttgagtgttcagaacagcgttagccatagtaggcccatactgaaaacaatccaaatatccttcaactagtaaacagataaacaaaatggtactacatccatgcaaggcaatatcattcaacaataaaaggggacaaaaat

SEQ ID NO: 551 - DNA, 300 bp, synthetic construct
  source 1..300: mol_type = other DNA
ggcacggtggtgcacgactatagtcccagctacttgggaggctgaggcaggagaattgctggaacccaggaggcggaggttgcagtgagccaagagtacgccactgcactccaccctgggtgacagagcgaaactctgtctcaaaaaaaaaaagaggaggctagtgttgggagcagctggtaatggccagtggtctgccagctgagaaagaatgtcgcagcatttgggttcacactttgcccctcacatgtcgccttgctgtggttgaagcaggtgggctgagttttaaaaggccatcct

SEQ ID NO: 552 - DNA, 300 bp, synthetic construct
  source 1..300: mol_type = other DNA
aataaataaataaaatgttgttaaggggtgatcaaaagagagtaacatgcatacatttataattttatgacaaatctgcaaagtgtgtgtaagaaaattaaggcaatatattaacataccacattgtccttgtgatgaggctctgctttcttggttctttctactttcatactttttcacaagaagcatgtattatgcttatagttggaaaaataataaactgaatgttaaaatgaaaataaaagtaaataaattcagaacttttaaaatgtagtatcataaactaagaggtgtataaag

SEQ ID NO: 553 - DNA, 300 bp, synthetic construct
  source 1..300: mol_type = other DNA
tggatggatcttgctgcacgttttagaatgaagtctgtgagttgccatgaaatgggcttccatgattatgatatagtggctcatcggtttgtttggattcacttaagctgtggtgacagacatgcactgagccagtgaatggtggaaaatatcctctagggctcctcattagtcacactagagactcaaacatcatttaaaacatataagcttcatatgacttgatcatccagtatgtgaattttctttccaaatcaatcaatcgttctctcccacatgcctccatcaaaacaagttatc

SEQ ID NO: 554 - DNA, 300 bp, synthetic construct
  source 1..300: mol_type = other DNA
atcaatattttgaagaattagttcaggaaagtcattaaatgaacaaagaacaataataatagcagcaataacacaactctgaagacaagggataaaattgatttccatggttgtatttccatgctgtattatttaatatgtgtgactgttaaaaaatgaggtacaaaaagaaacaggaaagtatgaaccacacacagaagaaaagccaagcaaaacagtcaatagaaactgcaacgatgaagcccagatgttgaacttactagacaaaagtttttaaattagctattaaaatatattttt

SEQ ID NO: 555 - DNA, 300 bp, synthetic construct
  source 1..300: mol_type = other DNA
tctacagagggcagtctcaggtttgccatgtcaactcttctctctctctctgtgtgtgtatgtatgtatctccgtgtgtgtgtgtttgtgtgtgagagagagagtatgatggttgcatacacattagaaaattaggagagatgcctgctctttccattattactgaatattgttctgaaagtattaaacaatataattaaataagaaggaagaaatcagacagaataaatattgtaaagtaggtaatgttacttaagaataatacaattttatatgtgaaaattatagaaaatcagttct

SEQ ID NO: 556 - DNA, 300 bp, synthetic construct
  source 1..300: mol_type = other DNA
atgcattacagaaagtatctttaagattctattgcaaaaataagaagactatatttctaacattaacggtaaccatttccatttggagatataaatgtgtgattttaaatttctacagtaagcatgaactacatttaataaggaaaagagctgaagctatttcgaaataatttaatggatcagttcacatggccaaatagataagaaatactctatttaaactcaaaatttagtaagatattctctagaggtcatagtgccaaaattgtatgtgtgtatgtttatacccttaccttcgtc

SEQ ID NO: 557 - DNA, 300 bp, synthetic construct
  source 1..300: mol_type = other DNA
cggtcaatcaggtccaccaggctctcatcctatacacagctcctggcatccagactagatcctttagaatgcaggattctctgtttaaaaaaaatagtatttttattatttaactgattttcaaccagcagtcatgatttatagaaacagattattttagtttcaattttataaatgacagagatgttttaaccatgaatgggtacaaaataatagcgtgaataagacctagtatttataggacaacagggtgactacattcaatactaacttaattgtacattttaaaataactaaaag

SEQ ID NO: 558 - DNA, 300 bp, synthetic construct
  source 1..300: mol_type = other DNA
gcacatttaagacaatctcccagaaagtaaaatttaaggatggagaatttgaaaagaaggaaaagagaaagaagatctgtccaggaggcccaatatttcaaataggaatttcagacagagaaaacagagtaaatgaagagaggaaattaacaaaaaaataatttatgcaaatacatcagaactgaaaaacgtgagtctgcaggttgaagtagctcactgagtgctcagcacatgtgtgaaatgagtcctacatcaagaaatgtaataataaaaagagatgatcattaacacctttttaaa

SEQ ID NO: 559 - DNA, 300 bp, synthetic construct
  source 1..300: mol_type = other DNA
atccatccctctctctctatattaatccatccatcaatccatttcattatctatgtatgtatgtatgtatatctatctatctatctatcatctatccatccagccaccctctgtctgtctgtctgtctgtctattggtctatcatctatcatctatctatctttatgtatcttactgagaacttgatacttaacaatgaaaagaacagatgaagacctcctcatggaacctttgttaagcgattaatggagggtgtgttccagcaaaatacgggaataaatcaagtaagaggaaagcata

SEQ ID NO: 560 - DNA, 300 bp, synthetic construct
  source 1..300: mol_type = other DNA
aaggcaatggccaatttagattctgagactctggtgagagttaaagctttaagttctgtgttaacaaatctcagtattttacgcttaccctctagagttctttgagttagcctcagttgcagccattttctgataatttgacctgaaggttaaattcttgtagggaagggtttctaaattagttaactgtgtttaggattaataaatattcctgaaaatctgaaatgtataactctaagtttttcaaagcagaaagcaatcttacatttctctttatttgcttttaaaataaaatacgca

SEQ ID NO: 561 - DNA, 300 bp, synthetic construct
  source 1..300: mol_type = other DNA
agctatcatgagcatcactgtccattgtcaatttcttatgatcatgacactgcttactatggttgtgataaggtagcatggtaaacttaaaatacacatgcacaccgtcatacacacatttagctagaccttaataatagtcacatttaaaataatctgttgctactgagtaatatcttcttccaaagtgtcataacagttacataaagcattcccagagtcagaaccttcagaaaataaagccaattattttctcgatgcaaattctccatgtaaatgtctttcctaaagatgtggtct

SEQ ID NO: 562 - DNA, 300 bp, synthetic construct
  source 1..300: mol_type = other DNA
accctcaagttaacatgatggaggctggagataagtagaagtagtaaagaaagatattccattttgctgacttaagcaagtcagatactaaatagaaaaaaacatagggtaaggagcaggtaatttagtggggattgggaagagaacttaataaatgcaggtttggataagttgaagttgagattccttgtgagccagcaaactggatgtataaatcattctcttaggtttatatgactggagatcacaagaaagatttgaattagaaatttttaattgagaggtttcacaatataaata

SEQ ID NO: 563 - DNA, 300 bp, synthetic construct
  source 1..300: mol_type = other DNA
acatcaaaacaataccactgaaatggcctgtcaacatttctttgatcaaggactggcactatggcccagaaacacaacagccaagtgacaagagaagatagtaatcttccagcaattattcaacttttcagttctactgtgctcctaggtcatactagggaagctgagtgtttctcaagtagacacatgactggaaaattatcagttaaccttactgaggcttcctaatgctgcagcaatgagacttactccactggagtcacactagaaggttttagtcaaatttaaaaatggggccag

SEQ ID NO: 564 - DNA, 300 bp, synthetic construct
  source 1..300: mol_type = other DNA
caaaactacactcaacctacacatccattgttagttgaactgcagtatatttgtactgtagaataattacatagatttatatatataccagtcatgtatatgccagcatggaaagatctccagcacatattgaaaagtggaaaaagtaaattgtgatattaggtatagaattatgacatttggtaaaaaaatgtgtttaaaaacaaaattatatgtatgtatgtgcataaatttacacacacatatataaatatatgcatgtgtatatatcttacatattgcatgggaggtgatctgggg

SEQ ID NO: 565 - DNA, 300 bp, synthetic construct
  source 1..300: mol_type = other DNA
gcaaagtcacatcttgcatggcagcaagcaagagagagagagagcttatgcagggatactcctctttataaaaccatcagatctcatgagacttattcactatcacgagaatagcacaggaaagacccacccccaggattcaattacctcccaccgggtcccaaagaaacgcagcaggcagcacccacactcatgctgactctgattgtcatcgaatcctcttctctccaattcctagtggagcaaaagagaaatttccaaaaagctatagtgaggaaaacaggcatagaaaaatgggta

SEQ ID NO: 566 - DNA, 300 bp, synthetic construct
  source 1..300: mol_type = other DNA
gtagttaaaaatgatccagggctagagatgccccagggactttgcaagaacaaatacaaaacctattagagggaatgcgtccccaaggcaagcctcaagtaattcccatgaataaaggtctaattagaaaggtttatttaaaaacaaaaaaaactctataatacacatgaatgacaatggcacataagcaagaaccaggagaaataacagaagaatcaaacctaaaagatattagatagtggacttaacaggcacagaacaaaaaaacacatatataatgttttaagaagtataagatat

SEQ ID NO: 567 - DNA, 300 bp, synthetic construct
  source 1..300: mol_type = other DNA
aaaatacacctgtatagtggagccatctggtggtcaccatttgaaccaaaccatcaaatttagtatcagtaatagtgggacaacctccagtttacagagaatacaagagaaagggttgtcatgcaaatctgatagtactagcaaagataattattctaaaaaaaaagtcgtaagactataagcaataaatagttattgagcagctgagttaggcatactatagtctcagtttcagtatctaaccagcttcaagtcaccatttcaaatgaaatatcaacgcgtgatgaaagttaacttact

SEQ ID NO: 568 - DNA, 300 bp, synthetic construct
  source 1..300: mol_type = other DNA
tgaaataacatgaagaatttttttctgaccacagtgatatgaataaaatggtataaaaggagaaattctgggaaattcacaatatgtgaaaattaaacaacatggttctgaacaacaaatgggtcaaaaaaattaaaagagaaattataaacatcttgagacaagcaaaaatagaaaaacaacatatgaaaacttaagggatgcagcaaaagtggttctaagagtgaagttagacctacatgaaacatataaacacctgcatgaaaacagaagaaatatatcaaagaaataaccaaacac

SEQ ID NO: 569 - DNA, 300 bp, synthetic construct
  source 1..300: mol_type = other DNA
ctgtagagttggatttcctcctcaaagggtagcttcccagcaaagccacattactgcttccaaagcagggagctcaccagtgtatacttcctgatttttctgtctactttccctaacttgggacatctgatcgttctgccaggccatgcagcaattcctttcctgtcctcctgttcatctgaaaaaggcttaagccagctctgcagctgagctctttgcattttctaagtcccccttcacatacctgaggtccccttgtcttcatatgatccccgatgtagtctggcaaaattaatgtgt

SEQ ID NO: 570 - DNA, 300 bp, synthetic construct
  source 1..300: mol_type = other DNA
ctctgcttctctctctggggctgcttctgtcgggagtggggtggggggtcactctgttccttagcactgtggcagagcacatgtcaagatgaagctctggtgaagaattgatcaaaaatagtggcggagtgagatggagatttaaatcaaagggctgatttatgaaggcttcaaagattttttttttttaaagaaagaacatagattagttgtttctgagggctggaggggacagagatagaggcggcgacggaaggatccttcaggtttcttcttgaggtgattaaacgttctgaaatc

SEQ ID NO: 571 - DNA, 300 bp, synthetic construct
  source 1..300: mol_type = other DNA
gaacaggatctctaacatgctaacagagaattgtcaacccaggctgttccagaatgaaaaagaaagacattttcagagggaggagaactaggaatttgccaccagatgatctgctctaaactaaatggggaaggaagttcttcagactgaaggaaaatgataccaaagggaaacctataactttagtaattttgtaaaaacgaagagcaacagaaattattttaaatggataaaaataatagacttttttgttcttaagtttttccaaatatgtatgattattgaaaacaagaattgttt

SEQ ID NO: 572 - DNA, 300 bp, synthetic construct
  source 1..300: mol_type = other DNA
ttaaagcagaggtggtatgctcctagtcatgatggaataacagactaaatttatacataattgaaataatagggaaaaagcacacaaaatataggaaagaacagttttccaacattgaaaaacaagtaaataacggcagtgatccccaagaatcagacatcaaagtaaaagagccctaacattgctctagcttactgcctggggagagtatgcagcataaaacagatcaaaccagtaggacctgggcgttttccctgagttgaagaggcagaggtcagggtttaagaaggctaagaattc

SEQ ID NO: 573 - DNA, 300 bp, synthetic construct
  source 1..300: mol_type = other DNA
accctgaaagtcctaagaactgaacattttaaccagagttttatttaaaaatggatatctggcttctgcataaattgaaaaacacaggctgtttggaagcctccctacccactccctgattattgaaaccatttgtgtgcaattttagcttaacttttctttgaaatcaaatattgcttttggattttggtgttattttaaaatttgaaaattaggctcaaacaatataaactaaactgaacagaaggcatcctgaaatcctaaaactattttttaaattttattttaaaaaataaaagc

SEQ ID NO: 574 - DNA, 300 bp, synthetic construct
  source 1..300: mol_type = other DNA
gttttcaccaggttgtccaagctggtcttcaattcctgggctaaagcgatccggccaccttggcctcccaaaatgctgagattataggcgtgagccactgtgcccatgcccaccctcatcccccaagtcactttaaaatctggacttcatttcataaagatacagccctaagaaatattacacatgctcaaatgaaattatttaaatcctgttctatagaaagtggaatccaataaaagaaattgaaggtaataatattcacttgaatgtgtatgtgtttttcggaatttaaaagaaaca

SEQ ID NO: 575 - DNA, 300 bp, synthetic construct
  source 1..300: mol_type = other DNA
gcctgggtgacagagtgagaatctgtcccaaaaaaagtcccaaaaccaacaaaacaaaaacaaaaacaaaaccacccatggtttactgtaatgtccctgctccctactctactggcaaaggcctatctaccttgtctcaaggcaatggcagtcattgtcaactcggggaggcttctgcttacttagttttgggatctcatgaacccaatggtctcccaagttgtataatcactgctacttaatcaaatggacaacatttctagctgagccaccttgcatcctatgaaatattgttacaat

SEQ ID NO: 576 - DNA, 300 bp, synthetic construct
  source 1..300: mol_type = other DNA
aagtatagcaatatgggaaatgcttctctttaatgaacacgaatatgcaccagattagcattacactatttgtagttacatacttggtcataagaaaatgaataacattgggttagctatttgcacgttaggcttttcatactttatttgcagaaagagagaattggattagatcatttgttttcaattgatttcctagaagtatttattatgatgcctaaaatatgaactcaatattttgaaaaatcctttatttactatatatgaaaagataatacgtttattaggagatgatttatg

SEQ ID NO: 577 - DNA, 300 bp, synthetic construct
  source 1..300: mol_type = other DNA
tgaatctcaggccaaatcctgaaaaccacttactaccttgaccagaaaaagaaaaggtgtgagtgatcagtttgttaagttctgcaaaatgcatggaattttcatgaatgactctcattttacccaggctgttcccatcctaaaaagtaatatatgccttgcaatcaccccttcaaggcaggtaaaaccctgatgggtatgcagaggccatttggtatctctgggtaatatgaatgcaaaggactgagaatgaagcacactgtttatttggcagcactgaaaaagaagagttaaaaaaaa

SEQ ID NO: 578 - DNA, 300 bp, synthetic construct
  source 1..300: mol_type = other DNA
taacaccaggaccttagccactcttcccaaatctcccttggtcatttctgggagtctccagagtgatgtctcaggcatgtcctgtaacaaatccacccatgtttgcctgctcctgctgtcactgctggctatccactgggacttcatactagactgcgggcccagatggagaacaggcacatgctatctccttccactgttcttggcccttctatcctcctatttcctcaacaaaagaagcaacagaaactaacaaaaactctctcctccttaagttgaaaaaaaaaggcttattgcttt

SEQ ID NO: 579 - DNA, 300 bp, synthetic construct
  source 1..300: mol_type = other DNA
tctgtgagaaggcaaacaccttacacagtgtaggtgaggggagattcacgcacctggaaccacccaggctggccgaattaagcctaagtcacctctggtaaagagggaaggagggtccatccctggttcagttactgacaccataggtgtagatcacaggtgcctatgtcctgctgctctccacagggacacttttccttggaagagatttaccaaatgctaattgagtgtttgttaaatgtttactatgggccaagccctgggtttttctctatgcattaaaagtgtgagtaaagggga

SEQ ID NO: 580 - DNA, 300 bp, synthetic construct
  source 1..300: mol_type = other DNA
aatcccagctactcgggaggctgagacatgaaaatcacttgaacccgggaggcagaggttgcagtgagccgagatcatgccactggactccagcctggatgacagagtgagactctgtctaaaaaaagaaaaggagagagagagaaaaaaagaaaattactgaaataaataaacagaggggaaggaaagaaggaacgttacaaagtttgtgggagtaaaccaaaaataaaattctaagcacccccaaccactgaatggattccccccttggccaagaggatcccaaagaaaacccgagga

SEQ ID NO: 581 - DNA, 300 bp, synthetic construct
  source 1..300: mol_type = other DNA
aaagagagtatatggaaactctctatgccttccattcaatttttctgtaaacctaatactgatctaaaaaatgaaatctattataattaaaaaaagttagggggataataaaacaaaaaatccagagaggtggttaccaatatgagggtgacacaagatgagaaaaaacacacagacagatgcagctacattagtgatattctagttctaatattgggtagtggtacatcacagatgttcattttactattatgcctcataacttgcatacataagatatatgcttttcaactactgagt

SEQ ID NO: 582 - DNA, 300 bp, synthetic construct
  source 1..300: mol_type = other DNA
ctactatggaaataactgcaagtagctaaagaatggtaaaaatctttggagaacaaattttaggatcaacctttgcaagaaattgtacatccctgtagagtctcctaggaagaaactaatcttactacagtcatagctagaagaaaggacagacctcacttcctacagcatgggggaaaactatctagtatcacagtgaatttaaatagggctggtgtagaactgggaatatgttttaaccaattctccaggttctaatgggaatggctattgaaccactctctataaaacacaatgtta

SEQ ID NO: 583 - DNA, 300 bp, synthetic construct
  source 1..300: mol_type = other DNA
ggtcatcagaattcagtattttaaaaaaaaatcccctgcaattcagatgcaaagaattcacggactaatatgtgggaaccacaggtttcaaggaacaagtgttacaattgtctttcccaatttaaaagcaaaaaatggaggttaagcaacatcgctttggttgcacagttagctaattgcatagctgagattctttcacaggcagcttgactccagaacctgtgatttttataccatacactgcagtggccattaaggccatctctgctgatgatgtgaacaagttgtttaaatatctta

SEQ ID NO: 584 - DNA, 300 bp, synthetic construct
  source 1..300: mol_type = other DNA
gtttgaggatattggtaacacaagtggttgctcactacaggtcctcgctggaaacagcactaaagaaccaggatgtggactgactcctctgtgcaagtcaccgacagtgcccatgtttatactgtaggcccacgaaccaagcagccatggcggcagggacggaggtgtgcatggactcaatcaccatctttccctcaccagagctgactcagctgccttctctgctgaagccctaagtggagaccaaggctgagctatggcatcttaattatgaggcatcccttccaaaagggaagacag

SEQ ID NO: 585 - DNA, 300 bp, synthetic construct
  source 1..300: mol_type = other DNA
accatgctgcagaaatcacagcagcaataaacacggcaggcaaatgtgtcaacccctggggaactttaacttgttttctgctgttgtagtgagatcaagtgtgtgtgattcaacaagacgggacatgtgaaacttccctgtacccctcaagcccagcacagagcctcatccagagtagatgctcaatgatgacaccttataaaacaacaaataatagccaagacctctcctaagtctgctgaggggtagccacatggcttcttaaaagtcagaggccatttgctattaaagaaagccatg

SEQ ID NO: 586 - DNA, 300 bp, synthetic construct
  source 1..300: mol_type = other DNA
ccagctactcgggaggctgaggcaggagaaacacttgaaccggggaggcagagcttgcagtgagccgagattgtgccactgcactccagcctgggcaacaaagcgagactccatctcaaaaaaaaaaaaaaaaaaaaaaattcctgacaatctcccgagttgttcctgaaggttggttttccatgcgctggttgtgtgtgtgacgctgtacaggaacatcagtgagtcaatgcataaaagaaactgcagtagacaatatacgataaagtacaatgcacaatatacaaaaaatagaaaaaa

SEQ ID NO: 587 - DNA, 300 bp, synthetic construct
  source 1..300: mol_type = other DNA
gagaaaccctatcctcaaacactgagtctgggccatgttctctaatgtgggctaactgcttagtacccagtacctacaaacaaatacttacttcacaaatacatacataaatacatgaatggatatattttgttaactctaaaatgctgtcaattgaacaatgtaccatcagttcaaaagagattgctcagaagagggaaaaaaaccaccacattgactgcaagacacatccccaaatcagaaatgttaaaatgtgcatggggattggtgggggatgtgcagcttagaattgactgagta

SEQ ID NO: 588 - DNA, 300 bp, synthetic construct
  source 1..300: mol_type = other DNA
agagacctggtgggcaaaatggagcaagaatttctggccttttgacaaacatctccacctactcctctttccccatttctgaaaactccttgcagataagaaaggcttaacagcaaaaccccatggtggaaagtttcttgctttttataccacttaatttttataataatttttccttcctgctatgatgtattcggcaaagccataatgaaaaactaaaaacacaacgtagttattcatgttaaacacttacaggtgcacagagcaacactagttaatgtcaaacatttctggtaacta

SEQ ID NO: 589 - DNA, 300 bp, synthetic construct
  source 1..300: mol_type = other DNA
acaatcttgattagatatatgtatagctatgattgttcaactctgtgtagccaagcatattgtggttgtattgtctaggagtcttgactgaattatctaaaaaacttcaaaattgtagtggcttaataaaatataattgtataattttcccatgtaatggtcctaatttacagttcagattggatgacaatctatccctctcctataagtactaactcaaagaccttggctatttacctctgagggtccaccacctcttagaaacttgtcatcagagattgcatctagcaaaaggaagaa

SEQ ID NO: 590 - DNA, 300 bp, synthetic construct
  source 1..300: mol_type = other DNA
atgtgattctcctgcctcaacctcctgagtggctgggattacaggctcctgccaccatgcccacctaatttttgtatttttagtagagacggggtttcaccatgttgtccaagctagtctcgaattcctgacctcaagtgatccaccagccttggcctcccaaagtgctgggattagaggcatgatgcactgcgtcccgctcagttttttaaagcatacaattcattgtttctcagtcttttggctaagatcaaatgtagtatcttttttttttttaagaccagtggttcagaatagaaa

SEQ ID NO: 591 - DNA, 300 bp, synthetic construct
  source 1..300: mol_type = other DNA
taagtctgactaggggcatcttggaagtcttcctggaggaggggccagttgaggaggacttcagatgttaagatgtttgagaggagaaaactggggaagttatggggaagcaacaggacatttaagcaacaaggacatttaagttggagattagaggaaaggccgtatgcagtgtccttcctccctaaggtcccaacttggctagggtagctggctgttcagttttcccttggaagtgacagagcctctctctgttttgtaaaatgtcacccagtttttgtttccagtttgaggtgcata

SEQ ID NO: 592 - DNA, 300 bp, synthetic construct
  source 1..300: mol_type = other DNA
tataaaactgtgtcaatgggcttataacacaaaaaggtgccatattcatgatagaataatggaaggaagaaatgaagcatagtttttgtatgctatgaaattaagttaatatgaactagattatcttaagtcaagttattaattgagggccaggagtggtggctcatgcctgaatcccagcactttgggaggccgaggtgagaggatggcttgagcccaggagtttgagactagcctggacagcatgtgagaccccacttctttctaaaaaaaaaaaaaaaaaaaaaatcaattgttttg

SEQ ID NO: 593 - DNA, 300 bp, synthetic construct
  source 1..300: mol_type = other DNA
tcacccctttggcttctttatctccctttggcttcacgttcattgtccaacacctcccagacaagttgtagctcctatataagcaggattggactactggcctatataagcaggattggactattggcatctcactagaaattttctcctgctaaaccatacactaacatacacaaaggaggcatttctcttcacagtctcaaggttttcccagcagaacatcactatataattatgattagttgcttaatctccaaaactttctacattagtgaatgcgcacatgaaacttactaggca

SEQ ID NO: 594 - DNA, 300 bp, synthetic construct
  source 1..300: mol_type = other DNA
tcattctatggcttaattccagctactcaactattctatctaaactactctagttttttaggtttgtaaaaagatgtagcgttgtatgtactctttttctttgtttctagtgttattttacagattattttttaccttttatcttaaaataagttcaggccaggtgcagtggctcacacctgtaaccccagcactttgggaggccaaggctggcagatcacttgaggtcaggagttcgagaccagcctcgccaacatggtgaaaccctgtctctcctaaaagtacaaaaattagccaggc

SEQ ID NO: 595 - DNA, 300 bp, synthetic construct
  source 1..300: mol_type = other DNA
ggtatttgtgaaccgtcctataaactttataaactctctggtatttggtagaggctcaataaatgtcatggtccccacccttcaccctccagcctttccacctatataaatgcaggatctcatttaatcctggttcttaaagtgtcctgtgaagcttagtgtgccagccggctattgctctggcctgacattctgcccccaaattgtgtgtgtgtttgtgtgtgtgagtgcacgtgtgtgtgtgtgtttagatcttttacaagggggaaagtgttcattatgtctaatataaaatacaga

SEQ ID NO: 596 - DNA, 300 bp, synthetic construct
  source 1..300: mol_type = other DNA
ccagggccgggaaggtgcttccacaatgccattaggtagacaggctcctcctgtctttctttctcccatctttagtgtgtagcttttatcttcatgcttgcaagatagtgaagtacatttagatctaatgtctacattataggcaggcacagagtgaagcgcagaaagcaattaacagttgtatttttccatctgatcaggaaacagtaactttcttgaaagtcccacacaggagactcctcacatctcattggcaagaactggctctcatagttatatttttgtatacaaaattattta

SEQ ID NO: 597 - DNA, 300 bp, synthetic construct
  source 1..300: mol_type = other DNA
agtggctcatccctgtaatcccagcactttgggaggtcaaaacagtggatcacatgaggttaggagttcgagaccaacctggccaacatggtgaaactccatctctactaaaatacaaaaattatctgggtgtgggggtgcatgcctgtaatcccagctactcaggaggctgaggcagaagaatctcttgaacccaggaagtggaggttgcagtgagccaagaccacaccactgcactccagcctgggcaacagagcgagactctgtctcagaaaaaaaaaaaaaaaaaaacccatgcct

SEQ ID NO: 598 - DNA, 300 bp, synthetic construct
  source 1..300: mol_type = other DNA
ggaggttcagcaattcctgtgtggttctaggtgggtacgtggatgccttctaagtgtggtctcagaaatccaaggtcagagtaaatctcaagtcattgaagctccagtttttgttagagtggatgtttgggctacatcactgccctgaaattgctgtgattcgacaggaactgaggcaaaccttcagctataagatgaagacctaatgcatggtgactatagggaataataatgtatatttgaatttgctaagacagtagaccttatgtgttctcaccacacacacacaaatggtaacta

SEQ ID NO: 599 - DNA, 300 bp, synthetic construct
  source 1..300: mol_type = other DNA
gtgatggcgttacagtcgacagttccatacccttcacttctgagacagtccatgttccaatagtcctaactgtgaaaaagaattcttcttaatattctttctatatatccttgtcaatgcccttaatctcattatccaagttatcatttttctcaatcagatgaattaaacaaacacttgagtcccaattatgtattaggctttactctgaacagtttctttaccatagccattaaaatcattactgactccttaaaaatgaccgcccacccacttttctcagtttaacaatggacttcc

SEQ ID NO: 600 - DNA, 300 bp, synthetic construct
  source 1..300: mol_type = other DNA
ttatgcatacatacctgtgataaagtttagtttataaattaggcacagtaagggattaacaacaactagtaatacagaacaattaaaacaatatataataaaaattatgtgaatgtggtctttctcaggatacattttcagaccacatttgactgtgggaatacattttcaaaccacatttgaccgtgggtaactgcaacggtagaaaaggaagctatggttaaggagggaccactgtatattgttaggttagttttttgttttgctagggaggtttttctatgttgaaaatgtatagat

SEQ ID NO: 601 - DNA, 300 bp, synthetic construct
  source 1..300: mol_type = other DNA
tttggaaggctgaggcgggcagatcacctgagatccggagttcaagaccagcctggccaacatggagaaaccccatctctactaaaactgcaaaattagctgggtgtggtggtgcatgcctgtaatcccagctactcaggaagctaaggcaggagaatcacttgaacccgggaggtggaggttgcggtgagccgagatcgcgccattgtattccagcctgggcaccaagagcgaaactccatcttaaaaaaaaaataaaaataaaaaaattttaaaaagaaaaaaagaaaaagaattaaa

SEQ ID NO: 602 - DNA, 300 bp, synthetic construct
  source 1..300: mol_type = other DNA
ctgcctcagcctcccgagtagctgggtttacaggcatgcgccaccacgcccaactaattttgtgtttttagtagagacagggtttctctgtgttggtcaggctggtctctaactcccgacctcaggtgatccacccacctgggcctcccaaagtgctgggattacaggtgtgagccaccgcgcccggccatgaaaattgttttaagagctatatgactctgagaagcttatgaagtactaatgaagatttgatgaactctcaaacaaatttttgtttgctagaaatataattcttgggga

SEQ ID NO: 603 - DNA, 300 bp, synthetic construct
  source 1..300: mol_type = other DNA
aaatgtgcaaaaactataaaactcactggtacagttgatactcaaaggagaaaggaatcaaaccttatggctacttaaaaccacccaaattgcaaaaataagatgggaagtaagaaacaaaaatttatataaaacaaccagaaaacaatgaagtgacaggagtaagtcttacttatcaatagtaaccttgaatgtaaatggattaaatttcccatttagaagataaaaactgggttaatagattaaaaacaacaacaatgaggcctaactatatgctgtttatgagaaactcacatactg

SEQ ID NO: 604 - DNA, 300 bp, synthetic construct
  source 1..300: mol_type = other DNA
tctgtatatacattaaaaaatatgtttttttaatagagacggggtctctattaagtgacctctattttttaagtgagacggggtctcactgtgttgcccaggctagtctcaaactcctgggctcaaattatcctccccacttggcctcccaaaaggatgggattacaggcatgagccactgccccaagcctaaaatttttttaagtaccgttagaatgtaaggattctttttaaaaaatttgattgtgcagggttggttattcaaccaatatgcaatacaatattcaatactgtatattc

SEQ ID NO: 605 - DNA, 300 bp, synthetic construct
  source 1..300: mol_type = other DNA
gtgaggctggctggagcagccacattttcctggcagccctgtgctttcttgggctggtcctttgagggggcccagtcctcctgaggctgtggccttgacctgcagaagccatgctagagtccagctgtctcttggtgcaggggtgtaaatggcacacattgtcaatgtggggttctcctacccctcatcccccagcacccagagggagagggtgccgctgcggcaaagaggcttgaagttggtttggtttgggggatttctgttgtgagtttttaaaaattgaggttaaattctcgtaac

SEQ ID NO: 606 - DNA, 300 bp, synthetic construct
  source 1..300: mol_type = other DNA
tggaccaagcatcttgtcttagcaccatagggtcggagaggagcctatgatgtttgttatctcagccttcaatggaagagacaaagctttgtgtggtattttacatttagaaactatcagaaacatgtatatttatattagtttcagaaatatatacctgtatcaagcctgttatatcagctgcaacagagatgtagcaatttaaaaattttaagagttgcctgggtatatgaaacaaaagatatatatagctttagctgggaaaaaatttcaaaaatcccattgagtttaagttacacc

SEQ ID NO: 607 - DNA, 300 bp, synthetic construct
  source 1..300: mol_type = other DNA
cctggccaacatggcgaaatcccgtctccacaaaaaatacaaaaattagctgggcatggtggcttgcacctgtagtctcagctacttgggaaggctgaggcaggagaatcacttgaacccggaggcagaggttgcagtgagccaagatcacgccaccgcactccagcctgggcgacagagcaagattccatctcaaaaaaaaaaaaaaaaatggtgtgagctctgtagcttagtaggttgcttccatggcagatgggaaaatatcgagtcatccattttgattttaaaaaagcaaggcac

SEQ ID NO: 608 - DNA, 300 bp, synthetic construct
  source 1..300: mol_type = other DNA
aggccacgcgggcattgaaatcacgactggtgtgtggaccaatcccaggatcctaaaaaagcgaaaggggcgggtttatgcaaaacaaactgagcagggagcaggcggcggaagaagtagaggacgtttaaatagggctgtttccaaaatatagccactactataaagaaagaataatgaaaactgtgtttcggaattataatgtattgggagataatttaacatttagtgcctggatagttaccataactggttggaagatgggaaggataaggccgccgaggcgaccgaagtaaaggt

SEQ ID NO: 609 - DNA, 300 bp, synthetic construct
  source 1..300: mol_type = other DNA
agaaataagtaaaacataagcgtgttagatggtgatgaggacttggagtaatcaagggaactaagccatcctctgagggaagatcatgccggccagaaagtacaagtcaaagagtgctggggcagaagcaaatctggttcaaggaagagtcaagagccagtatgggccaggcccggtggctcacgcctgtaatcccagcactttgggaggctgaggcgggcggatcacctgaggtcaagagttcgagaccagtctgaccaacatggtaaaaccctgtctctactaaaactacaaaacatt

SEQ ID NO: 610 - DNA, 300 bp, synthetic construct
  source 1..300: mol_type = other DNA
taatactagaatagtatatccagtgaaaatatccttcaaacataaaggagaaacaacgaattccccagacaaacaaaagctgagggagttcatcaacaccagacctgtcctaccagaaatgcaaacgagagttcttcaatctgaaagaaaagaatgctaatgagcaataagaagtcatctgaagatataaaactcactggtaatagtaagtacacagaaaagcacagaatattataacactgtaattttggtatgtaaactgctcgtatctgcagtagaaagactaaaagacgaacctgt

SEQ ID NO: 611 - DNA, 300 bp, synthetic construct
  source 1..300: mol_type = other DNA
tggttcctgccttaactgatgacattccaccacaaaagaagtgaaaatggcctgttcctgccttaactgatgacattctcttgtgaaattccttctcctggctcatcctggctcaaaagcccctaaaacggccccacccctatctcctttcgctgactctcttttcggactcagtccgcctgcacccaggtgattaaaagctttattgctcacacaaagcctgtttggtggtctcttcacacggacatgaatgaaacaaaactcttggcatccaaattaagccatcaaagcctcagcttc

SEQ ID NO: 612 - DNA, 300 bp, synthetic construct
  source 1..300: mol_type = other DNA
ctttatatggttactttaggggcacatattatgatatatcaaaatcaatgtaaataagtcatgtttgaacagagccgtagtctgcaagaatgaagaaatcactaatagaatttccttccttgttctaagaaaacatttagacaagaggagttcccaacaaatggactgtgacattggcgcagaagtggaaaagtgaactgcctaaaaaaggaccagctgaatgaggaacagggaggaggcaatatagaggtaaaaaaaaaaaaacaaaaaaaaaacaaaaaaaaaaaacagaaacaaaag

SEQ ID NO: 613 - DNA, 300 bp, synthetic construct
  source 1..300: mol_type = other DNA
cagaatggacttggagaatcttttgtatcagaaagtaaagttctcaaagaatgatagggacatgttataaggacacaggaaccagcataacggggcccccactggccaaatgcagacaatgtgtacatagtaagacaaatgaatgtagataccatcttagccaggtgatgaaacaaactggtatcgcactactcctgctatgatgcagtgagaacccttctgtgatactcccctcaaaaatgaataaatcaaaaggatcacagaaaaacacaaattgcaaggcattctataaaggaactg

SEQ ID NO: 614 - DNA, 300 bp, synthetic construct
  source 1..300: mol_type = other DNA
atctgcctcaccccacggaggaaaactgagtccaggagacaatccccccctaaatttaccaactgtttccccccttccagaagtttcttgagagcaggagccatatggattcgtctctgcatgcccagcctgagacatcagtgcctaggactcaggaggcatacccagcacatgcttgtagaagaaagaaagaaacagggaaggtgttttttgctatttatcgcatatttaatttcatctttattatatttttcctgattgtaacaggatgatgtcttaggtgtgaaaaattagaagtgg

SEQ ID NO: 615 - DNA, 300 bp, synthetic construct
  source 1..300: mol_type = other DNA
atttttaaaatgtatgcttcacacaacaccaataaacatctaagagatgtgatataatccaaggcaaagaaaagtaagaatcagttaatgtctattttatctgcacagcattacgaacagaaaattgtaataaaaaaaggtttaaccaaactgaaaaaaagagagacaaaatcttggttttaatttgaaaagatgattgggagtgatctcagaagagagttcagcaggaagcaaggaagaggctgttgaccttgagtgcagcctcaagaatggaacctttttgaaatattttaaaggaaa

SEQ ID NO: 616 - DNA, 300 bp, synthetic construct
  source 1..300: mol_type = other DNA
tcctggaagtgggaattgtacttttactttttactttgtataataaattattctttttaaacggtgggagtatgaatggtaacttttaacatttttcttttgtgttttttactgccaaatatgctaaacaatgaatctaagtggtaaagctatgtggtcttccagctataaaatgcatatttacatgaaaaatctcagataacaggaggcaaagattcttgttcagattatttatttcatgcaactgaaaatgtttcttcttatagtctctcataatccacatttaaagtattacatata

SEQ ID NO: 617 - DNA, 300 bp, synthetic construct
  source 1..300: mol_type = other DNA
tcacattgtattaggtattataactaaccttgaacatatatagactttttctcttattattatattgtattattatgatataatataacaacaatttacatagcattcacattgtattaggtattataactaatctagagattatttaaagtgtacaggaggatgtgcacaggttatatgcaaatactatgccattttatatcagggacttgagcatttatggattttggtatctaagagaggtcctggagccaagccctcacagatactgagggacaactgtatttagaataaatgttt

SEQ ID NO: 618 - DNA, 300 bp, synthetic construct
  source 1..300: mol_type = other DNA
tttttttcaccttaaaaatattaatgtggggcttacaaactcataaatcagttactggtcaaatttaaaaaaaaaatgacgtgccttggctagtgcaaacagtaaatcagtttttttactgtgtttgtttgattcgcttggaatctaacaaacattctgtaagaagttaccaccgaagacaggagaaacagatacctggcacttccttccttactaatgaaatgttatgcatttcagtactttctacgtgaggaaaagcaatattgcataagagtaattaaagtgttcacaattaggtcc

SEQ ID NO: 619 - DNA, 300 bp, synthetic construct
  source 1..300: mol_type = other DNA
agcctgagcaatatagcaagaccctcacctcttaaaaaaaaaaaaagtagattaaaaaaataccacaattgctcaggtagattgaaaaacaggcatatagtacttatggtacaggaccagcatgcatgcatgcatgcattgattgattgattgattgattgattgagacagggtctctctctgtctcccaggctggagtgcctggccttaagtgatctgcccacctttgcttcccaaagtgctgagattacaggtgtgagccaccatgtcagctggcgaggctttttaaaagatagttcc

SEQ ID NO: 620 - DNA, 300 bp, synthetic construct
  source 1..300: mol_type = other DNA
catcttgctgtgtcctcacatgtcagggagatagctttctagctctcttatttacttttataaaaggaattccatcaggaggattccaccctcatgacctcatctaaacctaattaccatccaaaggccccatctcaaaataccatcacatcataagttagagtttcaacatgtgaattttgaggggacacaaacattcggttgttggcaactgtaaagttggagcaacccccatacagaattcttggtctctgtggtaaaagatattatagtacaaaagccaagcctctgaacttaagt

SEQ ID NO: 621 - DNA, 300 bp, synthetic construct
  source 1..300: mol_type = other DNA
cttttactgtctcgtatctggaatcaccattttgccaagaaacgctggtttctttcagtggggagtagtatttggaaaccaaagtctgggtgtttagaatgctcacagtcctaggatgtccttgtttccaggccctttgagtagacagcattaaaaaatacatgtatttcaacagttgacttcatattgatatctccaattcaaatttaacattacaaggtttttcttcaatttaatttatatttattgccttacattaacaattatggctgttaataaataacatttattctatatccc

SEQ ID NO: 622 - DNA, 300 bp, synthetic construct
  source 1..300: mol_type = other DNA
ataccctgctcatgggctgaaccattcaaagtaacttctcacattataactttaacgttttaacggcttgacatgacattaacactatgtattttcttatatcattcttatgagacaagaagaatcagtcaattaaatatttaatgaacatctgttaagttcaaggtagtactctaatttgtagaaacatacaatttaccaagactgaatcacaaagacacagaaaatctgaacagaccaattatgagtaaggagattgatccagtaaccaaaaacttcccaatagagaaaaacccagca

SEQ ID NO: 623 - DNA, 300 bp, synthetic construct
  source 1..300: mol_type = other DNA
atccagtcacctcccttcaggcccctccttcaacactgaggatcacaatttgacatgagatttgggcaggaacacaaatccaaacagtatcgccatgaacaaacaaggctaactctcaattttctggaagagtttctaatctgtttagggcatggactgttcttggccagaggttaggcagtcatgatttaccccttcttctggtaaaagaaggaaagcaacagtacatatattatggtactaccagggaaggaaacgtaagtgagaaagcaataaaatttcatgaatagtaagcatatc

SEQ ID NO: 624 - DNA, 300 bp, synthetic construct
  source 1..300: mol_type = other DNA
aacgtttgattgttcctttaaaaattccattagtctcacttttcaggaatttgtctccagcttcctaacatttcctaaaattgttccctggaagtaaaagtactgcttcttttcgaaatgaccacttatttgagtacttccttgctccaacaatgtccatccgcagtgtcctcagatgtcacccaaactattctgaagacaaggttaattttaaggggatttcagagtcaatcatataaacagtttaaaagtgggatagaatggagggaaagtgcaagcactgagtgtattagataccta

SEQ ID NO: 625 - DNA, 300 bp, synthetic construct
  source 1..300: mol_type = other DNA
caaaacatttaaaaaagagattcaaatgagaatagcaaaagctaataaagtgttaaggtgacaaaaaactactcatacagaataatctactactatgatggaggttttatagatgcaagatacatattcacacatatatttaacatttttccctttggtaggtagaagatgaagtagaataccaacataagagcaatatgactggtttccagtctttgatctgccactagtttgtgaccataggaaaaccatcttaactttttttctgaacctctgttgttttcatttaaaagaatggag

SEQ ID NO: 626 - DNA, 300 bp, synthetic construct
  source 1..300: mol_type = other DNA
ccagcctgtgatagagtaattatgttgctagatccaaagtaaacaaaaagtttcccataaggcttggtattgcttacaagttacagtgaattctaggaagactattataaattataatttaatttatatatatatttagaattttcatgtgtttatactctaagagccatctgaataggaatttgcttggggctgtcaaaaagtgaagtattttcttggaacagtgaaatatcagaaaaaattatcttcatttgtctggaaagcagcattaagggggctcttatattacatgaaaatata

SEQ ID NO: 627 - DNA, 300 bp, synthetic construct
  source 1..300: mol_type = other DNA
ctgggtttgagtatctgaggaaagctgttttagagcagagcagagactcaaagcattggttctcattcattactagtcttctgattttgaatcaggcacatggcttctctaagcctcagtttgctaatctgtaaacaggagagtaatagtacttgcctctcaggttcttttttttcttttgtcaaaagcattttataagctacaaaggggtctagaaatgtagtttattacaatcgttgttacttacaggtctgaatttcctgcaggaaaaggggatagaaaagtataagaaataatggt

SEQ ID NO: 628 - DNA, 300 bp, synthetic construct
  source 1..300: mol_type = other DNA
aggataatgaccaagagacggttctggtcctcaagcttagtgatggggttcagggaggcagccagtttagcacaggagacaaacatataaacagataattataatcaaacgttatgggtttggcattagaggtatagtgggaagagtgatcaactccatgtgagggaaaaggcaaaactgcagggagtggggggggggcgtctgttaagtagggttctaaaagctgaataggagtttgcctggcaaacatggaatgggagtgggcagagtgatactccagggagagaaaatagcaggtgg

SEQ ID NO: 629 - DNA, 300 bp, synthetic construct
  source 1..300: mol_type = other DNA
tgactgttgttttttacataagccaaagtttagaaggtggactcaaggatggaccagatcaggatgggccaggtcatgctgtgatcacagacaaccccaaaatctcctgacttatgacaccaaagatggacttgctgttcccacttcatgcccatcacagggtatattctttggctccatgcggccttcattctgggacacaggctgctagtacagctgctgcctggggcaattatcagtcattgtggcagagggaaaagaggtcatggtgaagctcacattggctcctgacgctgccag

SEQ ID NO: 630 - DNA, 300 bp, synthetic construct
  source 1..300: mol_type = other DNA
aaaatacgttttttttttcagtaggtggatcaacctcaaattttaatataaagcattacttaaaggagaatatggggacattcatgacatttcttatatgtacataaaacttcatgaaaataatttaatgctatccagcagtttattttagaagtactggaggctaggcatggtgtcttatgcctgtaatcccagcactttgggaggctgaggtaggaggatcacttgagttcaggagctggagaccagcttgggcaatatagtgcgaccccatctctacaaaagagaaaagaagtactg

SEQ ID NO: 631 - DNA, 300 bp, synthetic construct
  source 1..300: mol_type = other DNA
gctttcccactgctcactctcctcgctcaaaattcaagtctcaaccgagtcatctctgtgacgtcacgttgatttgcataagattccccagcgtcccaagcgaatattcttatggttttcaaaacctgaatgtttgacacgggatgttccaacaacaagaaacctcctatgcagatgggccttaaatacggctggtggagtgggaacacgtcgtatacacggacacacgggcaggcactcaccctcaatgtaatggtagtcatcatccgtgggggagcggggcgcgaacagaacctttcc

SEQ ID NO: 632 - DNA, 300 bp, synthetic construct
  source 1..300: mol_type = other DNA
gagccaagtgaacagaaccctgattttgatcccttttctctcaaaagcccttcgcagtctctgaattaagtctattagcatgttcctcccatagtgctttgcttcatatcaacaaaaacctagctaagtgaaatcagcaacgatatgcagaaaccacctacgcaggtcacaaacatctttctatgattgtataattttcaagcaagcaataagtgaagatttttccataggccctaaactcacctttgcgaaataggaagctggtttattgggagtgatgagcagggggcgtaacaaatt

SEQ ID NO: 633 - DNA, 300 bp, synthetic construct
  source 1..300: mol_type = other DNA
ttaaaaactttgagacatgaggcaggaaaatatgactgacaaaaggaataggcagataattgataaagatgcacagatgatccagatgatgttagcaaacaagtaatattacaaataactatcataatatataactatgtaaatatttaaaatacagagaagttgtatacagtgaataaaaggagaactggaattaaaaaaaaaaaaaaacaaggagacatttagaaacaaacaactgatccctgaaatgagcatcaacgggacaatggccaatacaagtctgttaaggatgtggagcaa

SEQ ID NO: 634 - DNA, 300 bp, synthetic construct
  source 1..300: mol_type = other DNA
tcactctgtgcctaggctggagtgcagtggggtgatctcagctcattacaacctccgcctcgcgggttcaagcaatgcgccatgcctcagcctcccgaggagctgggattacaggcatgcaccaccacgcccggctaatttttttgtatttttaatagagacggggtttctccatgatggtcaggctggtctagaactcctgacctcaggtgatccgcccgcctcggccacctggtaagactgctgttaacatgttggtataaaactgcacaacttttttctaattacaaaaatagataa

SEQ ID NO: 635 - DNA, 300 bp, synthetic construct
  source 1..300: mol_type = other DNA
atgtagaattgcagcacaagatcaatctgcaggtagacatatatttttccatggttcttcgcaaggcatgctgagcatctttggtgagtttgtcaacttctgtcaataataccactgagtcaaagagaaacaaaacaaactttaacttgagttcactcaaactttaacttgtctctttcttccttctcattatccaggatgaaatcctaaataataagcctgatatactactcttcccattggcaaagataaagttataagtatggtaaaattactttattattttaaaatgctacaatc

SEQ ID NO: 636 - DNA, 300 bp, synthetic construct
  source 1..300: mol_type = other DNA
ctgggggaggagcatttcagaaagaggaaacataaaacagcattcctagggttagaaggagcctatagggttcaataacttgcagtgtggttggggcttatggatgctggatgaagataagtgagagaggtttacagggacagcatcatgtcaggccttgagggcaaggtaaggagtctggattttattccagatttgatgggaagcctttgggggatttcgattagggcaatgacatgatctgatttaggtttataaaagatctcttgaatacctcttgattataaatgggcaagagta

SEQ ID NO: 637 - DNA, 300 bp, synthetic construct
  source 1..300: mol_type = other DNA
attctttgagatatacatttaatatgtttgatatgattttggctgttaaattgtatgatgtgtcttcattttatgaaccattaaaaaagaaaaaaacatgctataaatataactgaaagaagccatttgttgcaagatattctgatgtcagagatcttatgaaatttgaacacattttagaactgcaaaaatacagttaagtagaatagtcaatgaaaaaaagaaatctatttgcatatataaatgtcctatgaaatttgattttccagtgaacactttacaaaaacaaataaagaatat

SEQ ID NO: 638 - DNA, 300 bp, synthetic construct
  source 1..300: mol_type = other DNA
acgtgtattgttgttaatatggacacatgacatatttgtctgcctgacttttgatcccagctacaacctctggccttttcaaatgattctttaatatcacataaagggaggtgagataactaaagggggtgattccggactaggaggcaagggagggcagataacatggtgctttgaaatcttctgtgacttttcagtcacttatttcattaagtgatatatctcactagaagtgaggtagaacataacaaatccatgtttgctgggcatatgttatgacaacagagaaattcacagact

SEQ ID NO: 639 - DNA, 300 bp, synthetic construct
  source 1..300: mol_type = other DNA
gaccatttcataatgataaagggcttatctcaccaagaaggcagtcacacttacgtttttatgtatttgttgaagagtcccaatgtatttaaagcaaaaataagcaactacaaagagaaagatacaaatccatgatcaaagtgaggaattttcacacacatcgtagtaactgatggaatgagtcaatgaaaaattagtgaggaaatagaagatttggacagcacaacaaatggcctaggagaacatttagaatgttgccttcgatgcttaagaatacatattcttttcaaaagaaaacac

SEQ ID NO: 640 - DNA, 300 bp, synthetic construct
  source 1..300: mol_type = other DNA
tctcgatctcttgacctcgtgatccgcccacctcggcctcccaaagtgttgggattacaggcgtgagccactgcgcccagccaagatcccagtttttaataaaaaacttttctcatagataaacttgaaataattttgaggacaaggtaaaactgtcatttgttttccatgctgcctaggaggcttgtagtatttattgaatacaagtggaattcatttgacgtatgcatcagaattagtttaaaaattgggattgtctttcttagacaaattcagaggtcatccaaagataaaggagag

SEQ ID NO: 641 - DNA, 300 bp, synthetic construct
  source 1..300: mol_type = other DNA
actgcaacctccacctcccaggttcaggcgattatcctgcctcagcctcctgagtagctaggattacagcccagctaattttttgtatttttagtagagatggggttttgccatgttggccaagctggtcttgaactcgtgacctcaggtgatccacctgcctcggcctcccaaagtgctgggattacaggtgtgagccactgcacccagcctccctgattattttttaattaaaaaattaatgcaaatatcatgaacaataaagaaagactaagaaactctcttagaaggaaactaagg

SEQ ID NO: 642 - DNA, 300 bp, synthetic construct
  source 1..300: mol_type = other DNA
aggaggatatataactcatgtctataaggccttgaggtcctgtgctagatggcatgctatgttttgatcagatttaattgagaactagctctgatattttatttatgtatttatttatttattgtagagatgcgtagtcttgccatcttgcccaggctggtcttgaactcctgggctcaagcaatcctcccacttcagcctcccaaagtgctgggattataggtgtgaggccccatgcctggccctacatattctaaaataagaaaaggtgttctgctatttagaaatgactgccaaatc

SEQ ID NO: 643 - DNA, 300 bp, synthetic construct
  source 1..300: mol_type = other DNA
ctcagcctcccaaagtgctggattacaggcgtgagccaccgcgcctggcctaattttgtatttttagtagagacagggtttttccatgttggtcaggctggtctcgaactcctgacctcaggtgatccgcctgcctgggcctcccaaagtgctgggattacaggcgtgagccactatgcccagcccctagtcagcaattttcttatcgggcataatttagatgcttataaacccaaggggtatacccatccttagaactacaaagacccatcacacctgctgtctaaatgtttccacata

SEQ ID NO: 644 - DNA, 300 bp, synthetic construct
  source 1..300: mol_type = other DNA
gagtcttaagaagctgacattttaaaaacaaaaaactcaagttgttattatagtattgtgacacttctgcataatttcctaacaaagaccagcattcatagtgctgaggaacagacttttccaggcattttactgaataagctgtaaaatgctgcctttgactttgctggtggcctgcttggcatagcttctctgggcctctgcttaactttcccagacagcacagcactttgaaacactctccccactgaatacaactaacaagttcttgataaatctctactatcaaaacttatttgg

SEQ ID NO: 645 - DNA, 300 bp, synthetic construct
  source 1..300: mol_type = other DNA
aggattcctggggccaccataacaaagcaccacaaactgagtgacttaaaacagtagcagtttcttccctcccagttgtggagcccagagtctgaagtcaagaagtcctcagggccacactcctcctcctcctcaggatagaggggagaatccttcctcttctagtttctggtggctcctggcatttcttggcttatggcagtttgactccagtctctgcctgtgtcttcacgtagcctttttcaatgtccctctgtgtctatatccaaatctccgtctctttcatgaagacaccatttt

SEQ ID NO: 646 - DNA, 300 bp, synthetic construct
  source 1..300: mol_type = other DNA
actctcagaaccttggttaacctcaagaaacattccagttccctatcagataggaatccaagactccctctgtggacaccaggcaccatgaaatccaagtctggcaatccagaggtgagaccacagtttcagtttctagggtctaaattgattaatgcaaatgtaatccatttacagtataatcccaggttcattgccctgtggtaattcaaacaatgtgagcattcaaggcacagaaataacaaaaaggctttttttaacttctagttatttttaaacatttttttttaatcatcatag

SEQ ID NO: 647 - DNA, 300 bp, synthetic construct
  source 1..300: mol_type = other DNA
caactacagatgtcactgaattcccattacctagaaccgtgcctgacaaacaaaagatacttgaaaaaattaacaaacaaccctacaaggtatgtcatataaccatttgccaagagaaaagagaagattagatttcagagacaaataacttacctaaagctgcatagtaaataaatagcaaatgcacctgaaagagccagcactctacccactgactcactacaacttgcgacataaagcatatatgctaagaaacaaaaacgcaaaagcaagcatttctacatgaaaacaccagatcac

SEQ ID NO: 648 - DNA, 300 bp, synthetic construct
  source 1..300: mol_type = other DNA
gacttgctcttagctgctttgtgaaactgaggatgtgcattaggtgtggagtcaatctgctctctttgaaatgagattcagaacaaaaaaacaactaaaacctagcaaaaaaccaaccaccaaccaacgaactgcctgggagttcagctatctgcctgtctgatctcaggtctgaaagccagaccatcacccctggctctctctctcccaacagacactgctggagagtatctgaatccagaccttttggaaaacaacataaagagatattaaatattttgacctcaagaaatcccaact

SEQ ID NO: 649 - DNA, 300 bp, synthetic construct
  source 1..300: mol_type = other DNA
tgctaggtcatatggtaactttggagaaacaccattttatgctcctcctggcaatgtataggggttccaatttcttcacatttttgctaatacttgtaattgtctgtctttcatatttttgtcattctcgtgagtgtgaagtggtatctcattgtggttttgatttgcatttccctaatgactaatggtgttgaatatcttttcatatgcttataagccatttatatgtctttggagaaattcttttcaaatctcttgctcattttaaaattaggttgtcattttattacggagttgcat

SEQ ID NO: 650 - DNA, 300 bp, synthetic construct
  source 1..300: mol_type = other DNA
atattgatccaagtgagatttcaatgtggaagagagggtcctacagctgaagaaaactggggagtcactcttccagagcaagctcttccagcacctcctctgccttcccatagtccacaggctgcctccggatctctaccatagcagtgaacctagtgaattaccgtgactcatttctctgtcaattttccccctaaaccatgagttcctcaaggaaaggaccatgttggatttgttgctgtatctctggctcccagcacaaaggaggcggttgtgcatgtgagatgaaggagggagaac

SEQ ID NO: 651 - DNA, 300 bp, synthetic construct
  source 1..300: mol_type = other DNA
tggctgggagatgacccaggtgggtctctatagggtggcatggcagcgagcacagacatggctgggctggaggagagcttccgcaagtttgccatccatggtgaccccaaggccagtgggcaagagatgaatggcaagaactgggccaagctgtgcaaggactgcaaggtggctgacggaaagtccgtgacagggaccgatgtggacatcgtcttctccaaagtcaagtgagccctaagcagcccctgcttctcatgttcccaggaggtggggaactggggggctggaaccagggaggac

SEQ ID NO: 652 - DNA, 300 bp, synthetic construct
  source 1..300: mol_type = other DNA
attgttcatgttgtatgcagaagcagaatgtcagaactactctcgccattctcctgcctcagcctctccagtagctgggactacaggtgcccaccaccatgcctggctaattttttgtatttttagtagagatagagtttcaccgtgttagccaggatgggtgaacccaggaggcagagcttgcagtgaggcaagatagcgccactgcactccagcctgggcgacagagtgagactctctctcaaaaaaataaataaataaaagaactaagtactttctgcctgatgaaactcagagttg

SEQ ID NO: 653 - DNA, 300 bp, synthetic construct
  source 1..300: mol_type = other DNA
tgcccaaggtcacagactggaagatagtaagatgtgaactcaagaaactgggatcagagcccacactctcacccaataccctacgcagtctcccttgaaaagataaggctgttcttaactacatgatctaaagtggccagtcagtatgcaagtgcaccatagatctggaagggatcacagagaaaacgggaagaaagggatttcttctggaaagtggaagtgaaaattatataacattttattctccatggaagctttgtctgaataatgtcatatgccttactactaagaaaggtgcat

SEQ ID NO: 654 - DNA, 300 bp, synthetic construct
  source 1..300: mol_type = other DNA
gagaacttaaattctatgcttctcttgttgtcagatagagtttgtcagctgtttatggttaggagctatgtggcaaccattgatttttgtaatccccagcacctagcaagtgcttaatactgtttagatgtttcgttaacaatcaattggtaaaatagcatgacataagtacctttaagtccaagttattctactttctgctttgtagacattaaatccatgggttaataggattgtttcatcctggtatagagaaaagacaaatttaaggtgtctttgcttgtcttaaaaaccaagttt

SEQ ID NO: 655 - DNA, 300 bp, synthetic construct
  source 1..300: mol_type = other DNA
agctgctttgctagcgtgcagatggagaaggcgggcccgggaggcttggagtttggcccaggagctggcaggtgcccagcagcagtttcactgcccgcttcaggcgactctccactggcttcctgggagccttccgttaggagatgctctctcaagatccccgtcaccagggctttctggttggaatgaggcaaggacctgctttacacggtgcgccccattacccaacagcgtttcctgtccttgctggccacagccatcacagtggggctgtcatcagccactttaaacaggcaaaac

SEQ ID NO: 656 - DNA, 300 bp, synthetic construct
  source 1..300: mol_type = other DNA
atgaactgataatatactacagctacaaaaaaaaggtggcgggggggaggatagtgataaagagctaaaagcacctttgtgtgaaaaataaattatcagaagagtatttgccaaacgcctagctactatcactctgattagcacacaattcggttaggcattttctgaggaaaattcctatgcccaaagatctttaaatgagtcacgattctcatctgaaaaaaaaaaaaattagaatgctgacaacactaaggtaaattcaacttcataaaagcatttcttaaaaactgtgtttctaaa

SEQ ID NO: 657 - DNA, 300 bp, synthetic construct
  source 1..300: mol_type = other DNA
tacaaaaattagccgggcatgatggcgggtgcctgtaatcctacctactcgggaggctgaggcaggagaattgctttaaccggggaggtggaggttgtagtgagccgagatcacgccattgcactctagcctgggcgacagagtgggactccatctcaaaaagaaaaaaaaaggaaaaaaaagaaacctcagcagaggaggaaaaactgtaaaaaaaagaaaaaaaaagaattttgtgcatagaaattgaaaatttggaaatgaaaatttcagactaaaaattaaaatgtcaaagaaatc

SEQ ID NO: 658 - DNA, 300 bp, synthetic construct
  source 1..300: mol_type = other DNA
gccccggctcccccaggcagaggcggccccgggggcggagtcaacggcggaggccacgccctctgtgaaagggcggggcatgcaaattcgaaatgaaagcccgggaacgccggaagaagcacgggtgtaagatttcccttttcaaaggcagagaataagaaatcagcccgagagtgtaagggcgtcaatagcgctgtggacgagacagagggaatggggcaaggagcgaggctggggctctcaccgcgacttgaatgtggatgagagtgggacggtgacggcgggcgcgaaggcgagcgc

SEQ ID NO: 659 - DNA, 300 bp, synthetic construct
  source 1..300: mol_type = other DNA
ctttcagtttgctgagaatgaggccttccagcatcatccacgtcccgcagagcgccctctgtgaaagggcggggcatgcaaattggaaatgaaagcccgggaacgccggaagaagcgcgggtgtaagatttcccttttcaaaaggcggaagaataaggaaatcagcccgagagtgtaagggcgtcaatagcgctgtggacgagacagagggaatggggcaaaggagcgaggctggggctctcaccgcgacttgaatgtggatgagagtgggacggtgacggcgggcgcgaaggcgagcgc

SEQ ID NO: 660 - DNA, 300 bp, synthetic construct
  source 1..300: mol_type = other DNA
cggctcccccaggcagaaggcggccccggggggcggagtcaacggcggaggccacgccctctgtgaaaggggcgggggcatgcaaattggaaatgaaagcccgggaacgccggaagaagcacgggtgtaagatttcccttttcaaaggcggagaataagaaatcagcccgagagtgtaagggcgtcaatagcgctgtggacgagacagagggaatggggcaaggagcgaggctggggctctcaccgcgacttgaatgtggatgagagtgggacggtgacggcgggcgcgaaggcgagcgc

SEQ ID NO: 661 - DNA, 300 bp, synthetic construct
  source 1..300: mol_type = other DNA
gccccggctcccccaggcagaggcggccccgggggcggagtcaacggcggaggccacgccctctgtgaaagggcggggcatgcaaattcgaaatgaaagcccgggaacgccggaagaagcacgggtgtaagatttcccttttcaaaggcggagaataagaaatcagcccgagagtgtaagggcgtcaatagcgctgtggacgagacagagggaatggggcaaggagcgaggctggggctctcaccgcgacttgaatgtggatgagagtgggacggtgacggcgggcgcgaaggcgagcgc

SEQ ID NO: 662 - DNA, 300 bp, synthetic construct
  source 1..300: mol_type = other DNA
acaaaaccctctgccgggctctttgggggcggagtcaacggcggaggcccaccgccctctgtgaaagggcgggggcatgcaaattcgaaaatgaaagccccgggaacgccggaagaagcacgggtgtaagatttcccttttcaaaaggcggagaataagaaatcagcccgagagtgtaagggcgtcaatagcgctgtggacgagacagagggaatggggcaaggagcgaggctggggctctcaccgcgacttgaatgtggatgagagtgggacggtgacggcgggcgcgaaggcgagcgc

SEQ ID NO: 663 - DNA, 300 bp, synthetic construct
  source 1..300: mol_type = other DNA
gagccccggctcccccaggcagaggcggccccgggggcggagtcaacggcggaggccacgccctctgtgaaagggcggggcatgcaaattcgaaatgaaagcccgggaacgccggaagaagcacgggtgtagatttcccttttcaaggcggagaataagaaatcagcccgagagtgtaagggcgtcaatagcgctgtggacgagacagagggaatggggcaaggagcgaggctggggctctcaccgcgacttgaatgtggatgagagtgggacggtgacggcgggcgcgaaggcgagcgc

SEQ ID NO: 664 - DNA, 300 bp, synthetic construct
  source 1..300: mol_type = other DNA
gagccccggctcccccaggcagaggcgcgcccgggggcggagtcaacgcggagccacgccctctgtgaaagggcggggcatgcaaattcgaaatgaaagcccgggaacgccggaagaagcacgggtgtaagatttcccttttcaaaggcggagaataagaaatcagcccgagagtgtaagggcgtcaatagcgctgtggacgagacagagggaatggggcaaggagcgaggctggggctctcaccgcgacttgaatgtggatgagagtgggacggtgacggcgggcgcgaaggcgagcgc

SEQ ID NO: 665 - DNA, 300 bp, synthetic construct
  source 1..300: mol_type = other DNA
ctcgagctcctgagtcgagacgggatttctccgtgtttgccagaatggtcttgatctcctgaccttgtgatccacccgcctcggcctcccaaagtgttaggattactggcgtgagccactgcgcccggcagatttttcttttaaaacgtggagaataagaaatcagcccgagtgtgtaatggcgtcaatattggtgtggacaagacaaagtgaatgaggcaaggagcgaggctggggctctcaccgcgtcttgaatgtagatgagagtgggacggtgatggcagggaggaaggcgacgac

SEQ ID NO: 666 - DNA, 300 bp, synthetic construct
  source 1..300: mol_type = other DNA
tccatgttggtcaggctggtcttgaactcctgacctcaggtgatccgcccgcctcggcctcccaaagtgctgggattacaggcatgagccaccgcgcccagccaagaaataacaatatttgttattttgacttttttaaaatgtgtatcaccttgttctttttctttctctccttgaatatttaaacatcttcactaactgaactaagaaattgaactaactcaactataaaaccgagagaggggggtaagtaaatagtcttttcatgggaacatgacagaaaaacagaaataagacatc

SEQ ID NO: 667 - DNA, 300 bp, synthetic construct
  source 1..300: mol_type = other DNA
aacatggagaagccccatctctactaaaaatacagaattagctgggtgtgatggcgcattcctggaatcccagctacttgggcggctgaggcaggagaactgcttgaatccgggaggcagaggttgcggtgagctgagatcgcgccattgcactccagcctgggcaacaagagcaaaacaccatctcaaaaggaaaaaaaaaaaaagaagagatagatttggcttcaaataacaggaaaacacaaaataatagtggcttcagtaagacaggacattatttctctttctcataaacactca

SEQ ID NO: 668 - DNA, 300 bp, synthetic construct
  source 1..300: mol_type = other DNA
atgaggagcatggccacgatggccggcctcatgtgtctggctcacttctctcaggattcctaaaagggatttctcacatcagcttccattggtctttcatttctgtggggcagcagggattatactcttctctcctgcccctaaacaatgtaacgagacactgtggagtgctgtctgtggacacacaggaggtgggcctggaacccagtgctcctgcctccagctccagataaaggaatgcaccttcgactgtctcctctaggaccccagtgtagcgggaatgccttaaaacaaagttgt

SEQ ID NO: 669 - DNA, 300 bp, synthetic construct
  source 1..300: mol_type = other DNA
aaggaactgctggttggaagcgggccgagatgagaacgcagttgcgctctctgaccagccaggcctatgcatgacgtcacgccgggaggtggagtatgtagattaaagactgcattttggaaacgcgttccttggaaggatttgcacaactctgttaccaacaccaagatatagtataaaaaatctgtttattttgttcactatatgtggataaagtccaattagagtcatttcaggagttacccgcacttgcaatgatgtgggcggcaccggggattgctggggtcacgcaagtacctc

SEQ ID NO: 670 - DNA, 300 bp, synthetic construct
  source 1..300: mol_type = other DNA
gctgggcttacaggcacccgccaccatgccaggctaatttttgtatttttagtagagatggggtttcaccatgttggccaggctggtcttgaactcctgacctcgtgatctgcctgccttggcctcccaaagtgttgggattacaggcgtgagccaccgtgcccagccatttctggctcttaaactttggaaaagtctttatcttgtaagtagcaggctagaacttgtgcaagaagagtgaccctatgtgaagagtgttttgaatctgagggtgagatgtcaggcaacaaccatgccttc

SEQ ID NO: 671 - DNA, 300 bp, synthetic construct
  source 1..300: mol_type = other DNA
ttaagttttatttcagtcgtgtcaccaagcatactaggaaaggacatactgaatgagatcatccaaaggggtgtggagtatgtagataagcgcagtgactgctggctatttgcaccctaggcttatatttcttaagattttgaatagccagatattaaaaatacaggtgctgggttattgtagtttggaaaatatctttattccagaaattagggggtctaaagagcacatgagaaaaatgatcctatatttagagtggtttgaatctaagggtgaactctcaggcagcgctggggactc

SEQ ID NO: 672 - DNA, 300 bp, synthetic construct
  source 1..300: mol_type = other DNA
ctcagcctcccgagtagctgggattacaggcgcaggctaccatgctcggctaatttttgtattttttagtagagatggggtttcaccatgttaggctggtctcaaactcctgacctcaagtgatccacccgcctcagcctcctaaagtgctgggattagtcgtgagccaccacacctggccctttccttccttttcttcctttctttcctcacttcccttccattccttcattccttctctttccttcccctgccttcccttccttcctttctttcttttgtcttaaagattcctgtgat

SEQ ID NO: 673 - DNA, 300 bp, synthetic construct
  source 1..300: mol_type = other DNA
tactttctgctgataatattaatatttctggaatgctatctggcaatttaaatacaaaggtccaacaatgttcatatccttttatcccttcagttttatgtctgggatgttattttaaggaaatagtcagaaatctatttttaattaacgtaaaaagatgtttcttatcattatttataacagtacacaatttaaaacaaaatttaaaaaatttaaaatttaaaacaaaatagggacatagttaaataaatgattatgtttccatatgatgaaatagtatgtgttaaaaataacatttac

SEQ ID NO: 674 - DNA, 300 bp, synthetic construct
  source 1..300: mol_type = other DNA
caggcgcctgccaccatgcccagctatttttttgcatttttagtagagatggggtttcagcctgttatccaggatggtctcgatcttctgacctcgtgatccacccacctcggcctcccaaagtgctggggttacaggcgtgagccaccgtgcccggcccacacctggctaatttttgcgtttttagtagagacagggtttcatcatgtttgccaggctgatctcaaactcctgtcctcaagtgatccgcctgccttggcctcccaaagtgttgggattacaggcgtgagccaccacacc

SEQ ID NO: 675 - DNA, 300 bp, synthetic construct
  source 1..300: mol_type = other DNA
attagacaaattaacattattgatatagcagtttgccatattgaaaagtatgaagatttgaatcaaagttaccagctataaaatttggacaattgtgtacaaaatagaaataacaatacctagcttacaatacagttgaacaagacggtatctgtaaagcatgacgtgtatatagtgcatagcatgttaacaagtttcagttccctcctctccattcgcctcaaatctatcaggagcgctaatctctaaccatctctatgctctgacacaaagttccctgtgaaaaacattatacaaagt

SEQ ID NO: 676 - DNA, 300 bp, synthetic construct
  source 1..300: mol_type = other DNA
atcagcaaaaggttaaggtaactgaacaggacaaatgacccagtttctctaacaaatcaatggcatgaaaggaaacaaaaggaaagggagaatgttagagaataaaggagacccaagaaacataataaccaaatacaaatggctttatttgaagcaggatccaagcaacttatgaaagacattttttagacaagtgagaaaacatgaacgtgaactgtgtattagatgatcatcaggcatcactagtacttttgttaggtgggataacaacatggcggctgtgtttaaaaaggagaaagg

SEQ ID NO: 677 - DNA, 300 bp, synthetic construct
  source 1..300: mol_type = other DNA
ggagaaactcataacaaatgtcaagtagaaaagagggttgtgaagctcttaggatgttgtcagaagatgaataggatttttacaatgaccgatgtttcagaaaaggaaaaacaatattgatgattcttagagataaatttatagctagagtaagaagtcatgaatctgtagttcaggaaacttgaaataataggtgacacagaacacatagtttatctcctttttatcttctcatttctgaaacaagaagttgctctgtaaattagaaaaactagaacaaacaaaaagaaaatagacaat

SEQ ID NO: 678 - DNA, 300 bp, synthetic construct
  source 1..300: mol_type = other DNA
cctctaccgtgagtctcctcttcctctctactgaaatcccaaacatttcttgaaatagtggctcttataccttactatgcataagaaaaaccctggagcatctgaaagagttctgtttccagctctccctgccctagaggttctgcttcactggggctgggataggatgtgcacaggacatttttttgtaagctgtccagtcaactccaagacaatcatggctctggtctgaaaacgactgctttccgcttttctctgcacaaccttccccaaatccagctctcagaattaattgctctc

SEQ ID NO: 679 - DNA, 300 bp, synthetic construct
  source 1..300: mol_type = other DNA
atgaggtaccaagacactgaataatgggaatgtaataatttggaacacagatgctgctacaggtcagggctttcatcctatcctggtataaaagtcataccgctttctaagaaatctttttacttttaaataatatacatattgcttgatttagatacccaatcaaaacacattctttccaagtatgaaatttaatttgtatacatatggaataaagataaatagaaaatccattttgctaatatacgtaatagttgcatgtagctgaccaaagcattcacatgtggggcctaaacattt

SEQ ID NO: 680 - DNA, 300 bp, synthetic construct
  source 1..300: mol_type = other DNA
gtaatacggcaacattgtattcacagaagtacagaatacataggaatactgtctctacagtcttgggcctttctgctggcaactgtgacactgtgacacacacatttgctttttattacatcaaaatgtgatgtgttctctattctcaaccccagacagcctgcatttctcactaggtcctgccaatttgtattcttccaaaaccacccaattctttagacagatcctttctctctagaggtgtgttcattagctctgcagaacgtatagtctccattcattaaaatttaaaaaaaaact

SEQ ID NO: 681 - DNA, 300 bp, synthetic construct
  source 1..300: mol_type = other DNA
aacatcttcaccatcatgtttatcaacctcagagtattctatggtaagaatgtttatttattcaattcctataatcatatttaggatatatatattattattattaaaaagtggactgctgtgaacatgtttgccagatttttatgcattatcataaatgcacaatttatccttttcttaaagataaatttctagaggtagaatttctagatcaaagaacatacaggtttttttaatagcttttaaaatagataaagtggccaagtttctatcaattttacgtttgtgtattaaaacgca

SEQ ID NO: 682 - DNA, 300 bp, synthetic construct
  source 1..300: mol_type = other DNA
gcaggcggatcacctgagctcaggagttcgagaccagcctgaccaacatggagaaaccccatctcaaccctgtctctactaaaaatataaaattagccgggcatggtggcgcatgcctgtaatcccagctactcgggaggctaaggcaggagaatctcttgaacccaggagatggaggttgccgtgacctgagatcgcgccattgcactccagcctgggcaacaagagcgaaacgccatctcaaaacaaaaagaaaagaaaactacaaaacaaagaatcaaagatataaataaatgaaga

SEQ ID NO: 683 - DNA, 300 bp, synthetic construct
  source 1..300: mol_type = other DNA
tctcctgggttcaagcagttctcctgcctcagcctcccgagcagctgggattacaggcgcccgccaccacgcccagctaatttttgtatttttagtagagacgaggtttcaccatgttggccagactggtcttggactcctgacctcaggtgatccacctgcctcccaaagtgctgggattacaggcgtgggccaccacgcccagccaattacatgatttatctcatgtgttagaggtgataactatatggaaaagaataaaagagggaagggagccttgtgattttaagtaaagaggtc

SEQ ID NO: 684 - DNA, 300 bp, synthetic construct
  source 1..300: mol_type = other DNA
tgtgtgtgtgtgtgtgtgtgtgtgtgtgtgtgtgtgttttaagtccctagaaaataatgcagcactctagtcctcccagttgtcctctcaaatctattttccatcttcctggatacatggctgcctaaccagtggctatatttcccagcctctaatattgggctaatgagaagtaggcaggagtgaatgacctgagccacttccggctattttgcttttgccctttctcaggtgcatcaatgtggagacggcaaggacagcagcagcaacagcacctgggagctcgttagaaagggaaat

SEQ ID NO: 685 - DNA, 300 bp, synthetic construct
  source 1..300: mol_type = other DNA
atctcatgatgtatatgcaatattccaaaactcaaaaaaatctgaatccaaagcacttctggtcccatgcatttctgataagggatattcaacctgcatcagttttcctgtttgtttcctttgacttctcttccacactgctggtttcatcatatgtctggtcggtcctccctgtctgttatggaaaggattctgtgatttgtgtggatttcctatccttctgtgtaggaaggcctgtttcctggggataggtggaagaagggggtttgtccagggcttacagataagatttcactctag

SEQ ID NO: 686 - DNA, 300 bp, synthetic construct
  source 1..300: mol_type = other DNA
gggattcaccagggcacaaggcgacgtgcgtctgtcctcacggagcctaagtgctggtggagacggacagtgcagatgccaaccgcaaatgacgaggcacttgcaggtaggggtcagcgccaagaaggaaatgaagggtgcgtgtcgctgactgagactctggtgggggctacttaaatagggccatgggggagggcctctctgaggaggtgacatttgagctgaggcctcaccaatcagaaggaaaaagctgtaaagggtctgggattaactcaacctggggacttttaaaataatgta

SEQ ID NO: 687 - DNA, 300 bp, synthetic construct
  source 1..300: mol_type = other DNA
gggattcaccagggcacaaggcgacgtgcgtctgtcctcacggagcctaagtgctggtggagacggacagtgcagatgccaaccgcaaatgacgaggcacttgcaggtaggggtcagcgccaagaaggaaatgaagggtgcgtgtcgctgactgaggctctggtgggggctacttaaatagggccaagggggagggcttctctgaggaggtgacatttgagctgaggcctcaccaatcagaaggaaaaagctgtaaagggtctgggattaactcaacctggggacttttaaaataatgta

SEQ ID NO: 688 - DNA, 300 bp, synthetic construct
  source 1..300: mol_type = other DNA
gtcaggagtttgagaccagcgtggccaacatggtgaaatcccgtctctactaaatacacaaaaattagccgagcatggtggcacacgcctgtaatcccagctacttgggaggctgaggcaggagaatcgcttgaacctgagaggcagaggttgcagtaagccgagatcgcaccactgcactctagcctgggcgacagagggagactccatctcaacagaaaaaaaaaaaaaaagaacatcccacagcagaagttcgttcatttattcattcatttattttattgttcaacaactacatct

SEQ ID NO: 689 - DNA, 300 bp, synthetic construct
  source 1..300: mol_type = other DNA
aaacatcctcaaagattaagaaaaggcactgcaaatatcagatcaattatgaaaacgatgttctgattagatgtcatttgaattgcactattattcaccaaaggatattgtaggcaagcatttgtaataggggaggaaatgatttggaattgctaaagattaggagggcttgaaaacaagcctttattggcctttgaagccttgggaagaatgtttgctcttcaggtgcccgtgtagccctgctctggagatcttctcagatgctgtcctactgcattgtccaaattaaacagagaagtc

SEQ ID NO: 690 - DNA, 300 bp, synthetic construct
  source 1..300: mol_type = other DNA
ggtttcaccttgttagccaggatggtctcgatctcctgacctcatgatccacccgcctcggcctcccaaagtgctgggattacaggcgtgagccaccgcgcccggccaatacggcagttttaagtaggaatttactaagttcaaagcgaactaatgtgtctcctaaaattcaagtcctatatggtgtcagcattttcattgtaattgataaagtattaaccagccatttgaacatctattatatgatatgcactgagctcaagtctagatacacaaatgagtaataaatgaacccttcca

SEQ ID NO: 691 - DNA, 300 bp, synthetic construct
  source 1..300: mol_type = other DNA
tgtctgtgttttatatcatttttcttctatttgtgtttgtctctgtgtctaaattttctttttataaaaggacatcattcgtactaaagtagggcccactctaatgacgtcattttaagttgctcattgcaaagatcctattccccagtaaggtcacattcacaggtacttagggttaggatttaaacaactatatatacatagctggaaaatattgacccctccattgagggatagatagatagatagatagatagatagatagatagatagatactcaaaagtatatatatatgcttt

SEQ ID NO: 692 - DNA, 300 bp, synthetic construct
  source 1..300: mol_type = other DNA
atactatacataaacattgattgagctcggggggactttctgtatatacatttaaaaatatgttttttttaatagagacagggtctcactgtgttgcccaggctagtctcaaactcctgggctcaaattatcctccccacttggcctcccaaaaggatgggattacaggcatgagccactgcccaaaggctaaaatttttttaagtaccattagaatgtaaggattctttttaaaaaatttgattgtgcagggttggttattcaaccaatatgcaatacaatattcaatactgtatattc

SEQ ID NO: 693 - DNA, 300 bp, synthetic construct
  source 1..300: mol_type = other DNA
tgtggctttggctcctgtccctgtgagggtgttaaaataacatcctcaaagtgagtatctggtctggtggcctcacttcctgttcatgatggctgagttcttggtttctggcacctggaagtgtccttttcctgtgtaagcacagcttcactttttacacttaaaaaaaattttatagagtattttagttaggtgttggggcaacagggtgagggtggttggaggtgctttcccacatcagctgggttcaccctcttgactggcgatcagtagttttactttgtattagaaacaaaaccc

SEQ ID NO: 694 - DNA, 300 bp, synthetic construct
  source 1..300: mol_type = other DNA
gagtagggaggagaagaggtggggacaggaaatggaaagtagcaagaaaaggggaaatgtagaagagagggaagggggagggagatggggagagggaggagggaagaggcatggcaagaggaagtgggaaagggagttggggaggataagtcacagactgagcaaccacagttcctcacactgtgcttgattatttccgtagaggtcaatccatttacttcttataatctgtgagctgagtcaggaagcttgcaactcagtaaggcagaagccttagattcacacagccaataatattgg

SEQ ID NO: 695 - DNA, 300 bp, synthetic construct
  source 1..300: mol_type = other DNA
ttcccacaaaggtaacatcttgcaaaagaatagtataagatctcaaccaggatagtcaatccactcatctgatttagattccccaagttttacttctccttgtgtgtgtgtgtgtgtgtgtgtgtgtgtcctctccagctacaaatgtcatgttccttattcaggataatctgtggttaaattcaggacttagagagagaaggaggtaggtttatgcaaatatcagatttctttgatggtaggcaacaaatggacacaggctaacttaaggaaaaaggaaatctataaaagctacgtagg

SEQ ID NO: 696 - DNA, 300 bp, synthetic construct
  source 1..300: mol_type = other DNA
cccacataacataatatttactaccttaaacattgttaagtgtataatttagtagtgttaagtatatttacgttgtcatgaaataggatctccaaaactttttcatcttgcaaaactgaaactctataccccttaaacaacaactccccacttcccaaccaactcctgacaaacaacattctacattttgtttctgtgaatttgactactctacatatcttatataagtggaatcatacagtcctgtttttttggtgactggtttctctttggtaattgattctttaaaaagaatcaggc

SEQ ID NO: 697 - DNA, 300 bp, synthetic construct
  source 1..300: mol_type = other DNA
aaagaacttactcatgtaactaaacaccacctgttccccaaaaacctgtggaaataaattttttttaaataaaggaatttgagaccccccgccaaaaaaaaccaaaaaacccaaaagtacatgatggctttggaaaataggcaagagggttaatgaattaaaggccttgaggcagtttaagggtaaattcagggagtataaggtttaagagaagtagaacaacaagtagttctgagagtggaccctctgtgtttggttttggaagtagagccattccaagtgtcactccagcaacaaata

SEQ ID NO: 698 - DNA, 300 bp, synthetic construct
  source 1..300: mol_type = other DNA
acagctagggagaagatcaacaaggaaatagatttggacaacgtgataaaccaactagagcagaatatacattcttttcaagtgcacgtggaacattttctaggacagaacataagttaaatcacaaaagaagtctcagtaaatttaaaaggattgaaatcatacaaagtactttggaattaaattagatggaaaggaatgaaattagaaatcaataaaagaaggagatttgggtaattcataaatatgtggaaattaaacagcacactcctaatacaaataggttgaagaagaaatcac

SEQ ID NO: 699 - DNA, 300 bp, synthetic construct
  source 1..300: mol_type = other DNA
caaatatttgggaaccaaataatgtgctttcaattaccctatgaatcaaataagaaatcataatgaaaattagaaagtgttttgaactgactgaaaaggaaaacacaacatatcaaaatttgtgagaggctggttaaaaaaaaaaaatgactcgggaaatttcgtagcagtaaaaacacctctatgaagaaaggtctcaagtcaatgagctcagaaaacatgttaataaatgagaaaaaggaaaacaaattaaattaaacagaacaaaggtaatggtaagtgtcagagtagaaataatac

SEQ ID NO: 700 - DNA, 300 bp, synthetic construct
  source 1..300: mol_type = other DNA
ctttttttattatggcagagtacatgtaacatatagtttgctattccaactgatttttgacaaagatacaacagcaaatcaatggaggaacaatagcctttttaacaaatggtgttggcacaactggacaactgtaagcaaaagaaaatgaacttcaatctaaatctcacaccgtattaaaaaaaactcaaagtgggccacagacttagatataaaatgtaaaactataacacttttagaaaaaatataggagaaaatctatgggatttagggcaaaagcatgattcaaaaaaggaaagt

SEQ ID NO: 701 - DNA, 300 bp, synthetic construct
  source 1..300: mol_type = other DNA
tttgagatggagtctcactctgtcgcccaggctggagtgcagtggtgcgatctcggctcactgcaagctctgcctcccaggttcaagccattctcctgcctcagcctcccaagtagctgggactacaggcgcccggctaattttttgtatttttagtagagatggggtttcaccatgttagccaggatggtctcgatctcctgacctcgtgatccacctgcctcagtctcccaaagtgctgggattacaggtttgagccaccgcgcccggccagggcagggtatctctcttaaaacctgg

SEQ ID NO: 702 - DNA, 300 bp, synthetic construct
  source 1..300: mol_type = other DNA
atgtctgcttccccctttccaccacgattataagtttcctgaggcctttccagtcacgctaaactgtaagtccattaaatctctttcctttacaaattacccagttagcagcatgagaatggactaatacacttagctatactaaggagatacactggtgaacaaaacagacaaaactcccttccctcactgactttacattatactgttgtagagtttctctcaaacctgatgatggctttccaattccgatcgaaacagaaaataaggtaatgaactctggattaagaatcatctgag

SEQ ID NO: 703 - DNA, 300 bp, synthetic construct
  source 1..300: mol_type = other DNA
cttttttttttaacctaacactgtatcttggaaatgacttcatattagtccacaaagagcttctttgttttttattctatttcattttgccagccccctattgaaggaaacatattgcttccagtcttttgctattatctaacaatgctgcaatgaataacattgaacatatgtcagataaattcctaggggtggaattactgggtcaaaaggtatatatatttattatgtttgatagtgacttccaaattaaactgaaaattttgtaattttttttccactctaaagaaatagaagttc

SEQ ID NO: 704 - DNA, 300 bp, synthetic construct
  source 1..300: mol_type = other DNA
cagagcgaaaatgactgttagatacaatagaacactctaagagtcattatcaaaaatgagcatatcggtgtgtaaaatgtatggtagttttatttaacggttgtttcattgtttaccgtagtgttttttcttacaattttgtggaagcctgtgtcagagttaagaacttttatagaagaggataatcatggatgattgaaattgacattttaagctgatactgaaagttattctaacttctattacatttatagttgtattttctttcaaaggataatggaagtcttaaaaagaaaatgg

SEQ ID NO: 705 - DNA, 300 bp, synthetic construct
  source 1..300: mol_type = other DNA
cgcaacaccttcttatttcacgacgtatggtcgtaaagcaataaagatccaggctcgggaaaatgacggagaggtggaactatagagaataaatttgcatatataataatccgctcgctaattgtgtttctgttttcctttgctaaggtagaaacaaaagaataatcacagaatctcagtgggactttgaaaatatccaggattttatacgtgaagaatggatgtatcgcattacggtagtcaccctatgtgtaaattagtggcacatacttggcactccttaatgtcaactataagatg

SEQ ID NO: 706 - DNA, 300 bp, synthetic construct
  source 1..300: mol_type = other DNA
tctattttggttactacggtaggtgcctggcggaagggagtgggcggagatatgtaaatagaaagtgcgtacagttagaacgtccggcacgtaactgatcggagcattctgggaagaagtaatttattccttttcggcagccgaatgaaaaaaaaatttaaaaaaatgtgcgagctaatatggcaaaacaactggaaggacgctaaataataggattgctcataccagcgcgttatgaactcaccctagcttgtaacggaatctttttcactgagtgcagaatgtcggctgtttgtctgt

SEQ ID NO: 707 - DNA, 300 bp, synthetic construct; identical to SEQ ID NO: 414
  source 1..300: mol_type = other DNA

SEQ ID NO: 708 - DNA, 100 bp, synthetic construct
  source 1..100: mol_type = other DNA
acatttgaattttttcttaaaaaaaaaaaaaaaaaaaaaaaaaaaaaaggagacacaccatcttccatggactgaatatctgtgtttctccagaatccat

SEQ ID NO: 709 - DNA, 100 bp, synthetic construct
  source 1..100: mol_type = other DNA
tattttaagtgttttaaaaacagatgcgattccgttaaatcgcgtgtggagctatgtaaagtgtattatagaacaaatgcgagttacggtttttcagctt

SEQ ID NO: 710 - DNA, 100 bp, synthetic construct
  source 1..100: mol_type = other DNA
actttctggagtttcaaaaacagaccgtacgccaagggtcatgtcttttttcgtattggtttgtgtcttagttgttaatcctacagtggaggcctgggga

SEQ ID NO: 711 - DNA, 100 bp, synthetic construct
  source 1..100: mol_type = other DNA
acctgacataacggggttcaagactgacaacgcctcacgcccacccgaaaacgtttacatggcttccttgtctctttttttttctgtcctaaagtcgcct

SEQ ID NO: 712 - DNA, 100 bp, synthetic construct
  source 1..100: mol_type = other DNA
actttctggagtttctaaaagtagactgtacgctaagggtcatatctttttttgttttggtttgtgtcttggttggcgtcttaaatgttaatcctacagt

SEQ ID NO: 713 - DNA, 100 bp, synthetic construct
  source 1..100: mol_type = other DNA
gtttcactcttgttgcccaggctggagtgcaatggtgcaatcccggctcactgcaacctccacctcccggttcaagcgattctcctgcctcagcctcctg

SEQ ID NO: 714 - DNA, 100 bp, synthetic construct
  source 1..100: mol_type = other DNA
tttataaataaaaaaaattttataatgatgcatctttacaaagctaacatgtttagtttaacaattttattaaacatcactcaaagggtgagtcaaatgt

SEQ ID NO: 715 - DNA, 100 bp, synthetic construct
  source 1..100: mol_type = other DNA
tctttactgttatatgttaggcgaaatattacgcgtttggagtaagtggtgctttttgtaactgaaaagagattctgtgtgtgtttttttttttttttag

SEQ ID NO: 716 - DNA, 100 bp, synthetic construct
  source 1..100: mol_type = other DNA
cttccatctcaagaagctgccagcctgggcaaaatggtaaaaccccatctctacaaaaaaataaaaaaaattagctggcatggtggcacatgcctgtggt

SEQ ID NO: 717 - DNA, 100 bp, synthetic construct
  source 1..100: mol_type = other DNA
cctccgcctcccgggttcaagcaattctcctgcctcagcctcccaagtagctggggttacaggcatgcgccaccacacctgggtaatttttgtatttttt

SEQ ID NO: 718 - DNA, 100 bp, synthetic construct
  source 1..100: mol_type = other DNA
cctcactaaaacaacaacaacaacaacaaaagacaaaatttgaattccagaaatagttattgcagcaacaagtcagtctccctgctggaaacacctatca

SEQ ID NO: 719 - DNA, 100 bp, synthetic construct
  source 1..100: mol_type = other DNA
aagaaaaacccattttccacaaacacaaaatctcaacaatgagaaaacaaacaactcaataaaaaacgggctaaagctctgaaccaacacttcgccaaag

SEQ ID NO: 720 - DNA, 100 bp, synthetic construct
  source 1..100: mol_type = other DNA
aaaaaaaaattcttttaaaaaattaaaaagtgaaaatgcagttactataaaggaatgacaattttgtttgcagcagattaaatgaaacaagaacttgcat

SEQ ID NO: 721 - DNA, 100 bp, synthetic construct
  source 1..100: mol_type = other DNA
tggttaaaaaaaaaagaaaaaagaaagcctatgtgaatgtctgcatatgatccttgaaatcggggatccaattacttttgtgattcccagaacacaggca

SEQ ID NO: 722 - DNA, 100 bp, synthetic construct
  source 1..100: mol_type = other DNA
ggaggttgtagtgcaaaaagcagtttgtctaccaagtgatactttcagcttttacaaatgctgaacaatatccgtggtgtgttttcatgtcacctcctct

SEQ ID NO: 723 - DNA, 100 bp, synthetic construct
  source 1..100: mol_type = other DNA
agaaaatttccacatatttcaacatgtatcttgcaaaaagcctatgaacttcaatttgtattcatacttgtaaaattatgttcacacattatttcttgag

SEQ ID NO: 724 - DNA, 100 bp, synthetic construct
  source 1..100: mol_type = other DNA
ggttgttgtcgttttaaaagtggattttgtttgctgtggaagcatatacaaggcgttagtataaactaataaacaggtctttgttcccatctgtaactta

SEQ ID NO: 725 - DNA, 100 bp, synthetic construct
  source 1..100: mol_type = other DNA
gtgcttctgtggtgcgaatagtaggtgagccgtaagtgtttttgtaactcagggtgcgggctcgtgttttgtggctgtgttctgtccggtcagttgtttc

SEQ ID NO: 726 - DNA, 100 bp, synthetic construct
  source 1..100: mol_type = other DNA
cctaacataacggggttcaaaactgacatcgcctcacgcctacccgaaaacgtttacgtggcttccttgtctctttgttttttctgtcctaaagtcgcct

SEQ ID NO: 727 - DNA, 100 bp, synthetic construct
  source 1..100: mol_type = other DNA
ggtgcttctgtggtgcgaatagtaggtgagccgtaagtgtttttgtaattcagggtgcgggctcgtgttttgtggctgtgttctgtccggtcagttgttt

SEQ ID NO: 728 - DNA, 100 bp, synthetic construct
  source 1..100: mol_type = other DNA
atttttgtagtttaaagaacagtctgcacggcgagggttacttgttttttttactggcttgtgctttactcttaatcgtttctctcacagtcggaggttg

SEQ ID NO: 729 - DNA, 100 bp, synthetic construct
  source 1..100: mol_type = other DNA
ggaggttgtagtgcaaaaagcagtttgtgtaccaagtgatactttcagcttttacaaatgctgagcaatatccatggtgtgttttcatgtcacctcctct

SEQ ID NO: 730 - DNA, 100 bp, synthetic construct
  source 1..100: mol_type = other DNA
ggtgttcgtgctaccccggggctgggttcgcgcacgctcctgacctgccttggctcacggccaacgcggatatcgccgccagagacccttcgccgccctc

SEQ ID NO: 731 - DNA, 100 bp, synthetic construct
  source 1..100: mol_type = other DNA
agatactgcagtgcaaaacgtgagctctacgcgaagggctactcttagtttctatgggtttgtagctttgacggcatgttaagtgtcgtccttactgtct

SEQ ID NO: 732 - DNA, 100 bp, synthetic construct
  source 1..100: mol_type = other DNA
ggattgctgtcgttttaaaagtggattttgtttgctgtggaagcatatacaacgcgttagtataaactaataaacaggtctttgttcccatctgtcactt

SEQ ID NO: 733 - DNA, 100 bp, synthetic construct
  source 1..100: mol_type = other DNA
gcgcttttgtggtgcgaatagtagatgagccgtaagtgtttttgtaattcagggtgcgggctcgtgttttgtggctgtgttctgtccggtcagttgtttc

SEQ ID NO: 734 - DNA, 100 bp, synthetic construct
  source 1..100: mol_type = other DNA
ggttgttgtcgttctaaaagtggattttgtttgctgtggaagcatatataaggcgttagtataaactaataaacaggtctttgttcccatctgtaactta

SEQ ID NO: 735 - DNA, 100 bp, synthetic construct
  source 1..100: mol_type = other DNA
caggggattaaaatttaatgttcaaaacagaagaaggaaaaaaaaacagtctgtctatgtgggatgggatacaaaagagtgggataagaattatcttttg

SEQ ID NO: 736 - DNA, 100 bp, synthetic construct
  source 1..100: mol_type = other DNA
cccccacaaaaagaaaaaaatgcattctaaaaaaaaactaaagaatgctttaggaagtattgactggcagtagtgtacagcatgaataggatcaaggcaa

SEQ ID NO: 737 - DNA, 100 bp, synthetic construct
  source 1..100: mol_type = other DNA
ctgaacttaaaaaacaaaagttgattgaaaaaaaatttttttttttttttgagatggagtcttgctgtcgcccaggctggagggcagtggcacgatcttg

SEQ ID NO: 738 - DNA, 100 bp, synthetic construct
  source 1..100: mol_type = other DNA
aagtaaattaaaaaaaaaaaaactattaacagagtaaacagacaacataaagaatgagagaaaatatttgcaaactgtgcatctgagaagggtctaatat

SEQ ID NO: 739 - DNA, 100 bp, synthetic construct
  source 1..100: mol_type = other DNA
acttagacaatgctgagaaatgagaaggtatggctggcttggcttttaagctgaaacttttactacaggcctgggagttatgacagctggagtctgaata

SEQ ID NO: 740 - DNA, 100 bp, synthetic construct
  source 1..100: mol_type = other DNA
ttttttgtctgtttgtttttaggtcctgcttgggcagggccaagtaaaaaagaaaaaagaaaaaagaaaaaaaccacaaaaggtcatcgaattagggtca

SEQ ID NO: 741 - DNA, 100 bp, synthetic construct
  source 1..100: mol_type = other DNA
catgcaaaaaattatattattatgtaattattattaactaatgtccaattttcacaaaacatgtttaaaaattttctctagacatttgtcagggagtagt

SEQ ID NO: 742 - DNA, 100 bp, synthetic construct
  source 1..100: mol_type = other DNA
ccccccacgggatatgggatatggagagacaactgtaacttgtttccatatctgcttatctcaaccagaggaccttgtacagtaccagaacccaataggt

SEQ ID NO: 743 - DNA, 100 bp, synthetic construct
  source 1..100: mol_type = other DNA
ccctgaaaaaaaaattaatttaaagtttaaaaatattttaataaaataaaataagtccagacttacctgagaagacatagcaaggacctgttcaagataa

SEQ ID NO: 744 - DNA, 100 bp, synthetic construct
  source 1..100: mol_type = other DNA
ggatggaaaatgattgtgtaattggtacgaggtttcctttgtgatgattaaaatgttctggaactagatagtggtgtcagttacacaatattgtgaatgc

SEQ ID NO: 745 - DNA, 100 bp, synthetic construct
  source 1..100: mol_type = other DNA
gtgttagatgatgttaagcactaggcagaataataaatttgggaagaggtagaggaaaaatgtaggttacagtatgggctaagttgttgtaacaaagtgt

SEQ ID NO: 746 - DNA, 100 bp, synthetic construct
  source 1..100: mol_type = other DNA
atccagcactccccagtagtcctttcataaaagagccctgccattcccaagtccattgtcatgatttattgcttgcttgttgggatttcaccatctagag

SEQ ID NO: 747 - DNA, 100 bp, synthetic construct
  source 1..100: mol_type = other DNA
cgggggaaaaaaaaaaaaatgaaagaagcacatgtcttattcatatgtaaaatgcctagagtaacagacactcaatagtctatttaggtatagattactc

SEQ ID NO: 748 - DNA, 100 bp, synthetic construct
  source 1..100: mol_type = other DNA
aataaaaagttttttaaaaaaactttatttagggcaggcgcagtggctcatgcctgtaatcccagcactttgggaggctgaggcaggtggatcccctgag

SEQ ID NO: 749 - DNA, 100 bp, synthetic construct
  source 1..100: mol_type = other DNA
gcctgcaaatgtttgatagatactctaaaattactctctagtgaggctgtaccaatcaacacctcatctcagcagtgcgttgatgctcctgtttccccaa

SEQ ID NO: 750 - DNA, 100 bp, synthetic construct
  source 1..100: mol_type = other DNA
tgtgtgtgtgtttgtgtgtctagtagtgtttacatgcattcttcccttggggatatttttttttttttttttttgagacggagtttttctcttgttgccc

SEQ ID NO: 751 - DNA, 100 bp, synthetic construct
  source 1..100: mol_type = other DNA
aatgattaaaaaaaaaagtcaaacacattattgaaagaagcaagttaaaattgaagttaaaaactgaatatgtgggctgggcatggtggctcacacctgt

SEQ ID NO: 752 - DNA, 100 bp, synthetic construct
  source 1..100: mol_type = other DNA
ccacatccatttcctgccttggtcagaactggctccggaatgggacagggctgcctgtggctccagctgggggaggctgaggtgaataaagacagtgatg

SEQ ID NO: 753 - DNA, 100 bp, synthetic construct
  source 1..100: mol_type = other DNA
acctcagggcaaggaatgttttctgtcgcaagatcctaaataacagacattcaaaggaaaggtatgagttggaacatgttaaactaaaagttgctgcaca

SEQ ID NO: 754 - DNA, 100 bp, synthetic construct
  source 1..100: mol_type = other DNA
aaaataataataataaaaatttgttttagaaagtgcccaaaccttcatcctttcctatcaagaaggagaggacttccctgccagagttccaaggcagggt

SEQ ID NO: 755 - DNA, 100 bp, synthetic construct
  source 1..100: mol_type = other DNA
ctgaataaaaaataaagtttaaaagggttagtggatgtaaaattaatatataaaggtcagtcatatttccatatctcagcagcaaataactggaaaacat

SEQ ID NO: 756 - DNA, 100 bp, synthetic construct
  source 1..100: mol_type = other DNA
gaaaaaaaaaaaaaaaagatcttacaagtataatcataatattcttcaaaattataaatacttacacatataaattatgaacatgtatgcatatatgaga

SEQ ID NO: 757 - DNA, 100 bp, synthetic construct
  source 1..100: mol_type = other DNA
cactgaattttatagttaaaaagaagaaaaaacttagagacacagaatcaaagacctaagaataccagagcacaccagcaggataaataccaaaaacaaa

SEQ ID NO: 758 - DNA, 100 bp, synthetic construct
  source 1..100: mol_type = other DNA
atatattgacaatgttacttctttgtttaggttaaggcattaaaaatttattcataaaataaatcaatctattcataaatagaaatagtctttttagaag

SEQ ID NO: 759 - DNA, 100 bp, synthetic construct
  source 1..100: mol_type = other DNA
atgaaaacctgttttcatagacttatcagttcaaacagcagtaattcgtaaataaactagtactttgtggttaaaccagtagagggtgcacaagacgcgt

SEQ ID NO: 760 - DNA, 100 bp, synthetic construct
  source 1..100: mol_type = other DNA
taccccacctcgcctcccaccaccccgtccaaaaaaaaaaagattaaagagaacagaatggactagggtccaagctggtgactgggagtttatgtaatgc

SEQ ID NO: 761 - DNA, 100 bp, synthetic construct
  source 1..100: mol_type = other DNA
cctacccctttggacttaccaaacatctctgtaatcctttaatgtacaagtaatagacatctacatcactccaaacaacactctacctgctccaggggga

SEQ ID NO: 762 - DNA, 100 bp, synthetic construct
  source 1..100: mol_type = other DNA
taaaacacaacaaacaaacaatcaaacaagaaaaaaccacagaggctgttgaaccttttagtcagaacatataatctccaatgtatcatagtttccacaa

SEQ ID NO: 763 - DNA, 100 bp, synthetic construct
  source 1..100: mol_type = other DNA
tttttttttttaagtttacacgctgtttaattcaaccactgttctgggttttatttgtttgtttttcaagaaggaagtataaaatctttatgttataaat

SEQ ID NO: 764 - DNA, 100 bp, synthetic construct
  source 1..100: mol_type = other DNA
tgaaaaataaaaaataaagaatatatatatatatatatacacacatacacatatatttgaagatcaaaagaaatatgtaaataattcttttcagcatata

SEQ ID NO: 765 - DNA, 100 bp, synthetic construct
  source 1..100: mol_type = other DNA
ggcaaaaaaagaaaacgaaacactaccataaaaccttggtaacttttaaaataaatcaacattctatctccccagctcaagctaaaaggctttatttctt

SEQ ID NO: 766 - DNA, 100 bp, synthetic construct
  source 1..100: mol_type = other DNA
aaaaaaaagaaggaaaaaaatgcttttggctgagtgtggtggctcacgcctgtaatcccagcactttgggaggccgaggcaagcggatcgcttgagccca

SEQ ID NO: 767 - DNA, 100 bp, synthetic construct
  source 1..100: mol_type = other DNA
ctcacacacacacacacatactcaaatggggccttgagcacaggaaaggagaggcaactataactgagcccacaaatgaagcctcttagagcctcctgtc

SEQ ID NO: 768 - DNA, 100 bp, synthetic construct
  source 1..100: mol_type = other DNA
gggtcaggggggaagaattccctctgtgatagccccatttagaatagtgtttctgcctatctatgtatattgctgtttttcctcctttagtaaagatgga

SEQ ID NO: 769 - DNA, 100 bp, synthetic construct
  source 1..100: mol_type = other DNA
ggtagtctgagtttgggcttggcccagggtggggaaaagcccttgtcctggggcagttaatgtgcaggtttcatgatggagcctggagggtgttgactgg

SEQ ID NO: 770 - DNA, 100 bp, synthetic construct
  source 1..100: mol_type = other DNA
cccccaaatgtttctatattaaaaaaataatgagaggcaatttgttttttgtagttacttagctagaaaaggaaaaatattttaacctgtattttttttt

SEQ ID NO: 771 - DNA, 100 bp, synthetic construct
  source 1..100: mol_type = other DNA
ctatttaaaaaaaaaaaaaaaaaaaaggaagaagaaaggaaaaaaaaacggttaaggccaggaggaagcatctcagtggcaggtcttagcctcatgccca

SEQ ID NO: 772 - DNA, 100 bp, synthetic construct
  source 1..100: mol_type = other DNA
ataaatatgacacattaccaacagaatgaaggagaaataccatatgataacctcaatagatggccaaaaatttttttgataaatttaacatctcttcatg

SEQ ID NO: 773 - DNA, 100 bp, synthetic construct
  source 1..100: mol_type = other DNA
tgtaacaacaacaacgaaaaaaatatatatatatatttatcagccctaggaaatcatgtgttttactacattagcagtaactctccatcttttcctccct

SEQ ID NO: 774 - DNA, 100 bp, synthetic construct
  source 1..100: mol_type = other DNA
cccaaaaaagaacggaaaggaaaaaagaaaggaatgaaaaggaagggaggaagggaaagaaaaagaaagagagggaggagggcgggagagaggaaaggaa

SEQ ID NO: 775 - DNA, 100 bp, synthetic construct
  source 1..100: mol_type = other DNA
ctaaattaaaaaaaatacaatagatagcattcaatataataactgctactgttattataattgtcacaactgctgttacctcaactaattcataaaatag

SEQ ID NO: 776 - DNA, 100 bp, synthetic construct
  source 1..100: mol_type = other DNA
ctgaattattaggttggtgcaaaagtaattgcaattataaaaaaaaaaaagaacctttcctgctttttaagcagacaacaatgcattcccctctgctgcc

SEQ ID NO: 777 - DNA, 100 bp, synthetic construct
  source 1..100: mol_type = other DNA
aaaaaaaaaaaaagaaaaaaagaaaaaaataggaagagatataatcccaccatacatacatttaggatgacccaggatttcccagattaacaaggtcgat

SEQ ID NO: 778 - DNA, 100 bp, synthetic construct
  source 1..100: mol_type = other DNA
ctaaaaaataaaaattaaaaaataaataaataaaaattccactgaactaaaaacaaacaaaaaaatccagaaggcaagaattagcactttgagaattgca

SEQ ID NO: 779 - DNA, 100 bp, synthetic construct
  source 1..100: mol_type = other DNA
ccaccgctcccctcaaactcccatgttaaaaaaaacttttttttttttttatgagtgaataggtagttggattttttttttttttttaagagacggggtg

SEQ ID NO: 780 - DNA, 100 bp, synthetic construct
  source 1..100: mol_type = other DNA
tagaagggaagaacactgcagagtagcttgcacacctagtatctgtgatatgctggttttcctattccttgaactaccttgaagttcctggtctgcggac

SEQ ID NO: 781 - DNA, 100 bp, synthetic construct
  source 1..100: mol_type = other DNA
gggttttaatttttaatctatgcatgtttttgctaaactttgagaaataatttcatactactttggtcatcaaagaccaaacttgaatttttccctttgt

SEQ ID NO: 782 - DNA, 100 bp, synthetic construct
  source 1..100: mol_type = other DNA
ccccaccccccacaaaaagtgaataaaaagaaaggaaaaagaaaacaaataaataaaatatatgtatacccacagcaaggtctgaggacagtattcaaac

SEQ ID NO: 783 - DNA, 100 bp, synthetic construct
  source 1..100: mol_type = other DNA
ttttattttttcaatattaaaatgaaatttaaaacataaaaaataaaaatattgattattataaatgggatatgagacctttaaaacatcacttttgtgc

SEQ ID NO: 784 - DNA, 100 bp, synthetic construct
  source 1..100: mol_type = other DNA
cccaaaaaatattaaaaaataaaaaataaaaacaatattgaggattttctaaaatttttttgctacctctaacaatgttgcaatgtaaatccttgtatat

SEQ ID NO: 785 - DNA, 100 bp, synthetic construct
  source 1..100: mol_type = other DNA
ttggtacctgtggcttagtcaccaatagaaatcaagatagtttcatataacattatagttacccctgatatctcaaaatatttgccctgatcactattgc

SEQ ID NO: 786 - DNA, 100 bp, synthetic construct
  source 1..100: mol_type = other DNA
cctcccacacacataaattctcaccaatcttgagggaatgttaaaataagatgtgctttgattggctgatattaaggcatattagaaatgaaagaactgt

SEQ ID NO: 787 - DNA, 100 bp, synthetic construct
  source 1..100: mol_type = other DNA
ctgaacttaacattaaaaacaaattaaaaaatgaaaagatagggatgtaaaagtatccacatgagctgataccaaggagttggagccaggctccagggaa

SEQ ID NO: 788 - DNA, 100 bp, synthetic construct
  source 1..100: mol_type = other DNA
actattgttataatgaacacattaccagagctcatattttgtttattctcaaccttttttctttcattacagtgtatgaactaagcaatggacaaaactc

SEQ ID NO: 789 - DNA, 100 bp, synthetic construct
  source 1..100: mol_type = other DNA
tacaaataaaataaataaataaatataaaatagaaatttggccaggtgcagtgcctcatcctgtaattccagcactttgggagccaagacaggaggatca

SEQ ID NO: 790 - DNA, 100 bp, synthetic construct
  source 1..100: mol_type = other DNA
agatagaagtttacctatgtaacctgcacttgtacccttgaacttaaaagttacaaagaaaaagtattactagcttctctgttaggtatagagagggact

SEQ ID NO: 791 - DNA, 100 bp, synthetic construct
  source 1..100: mol_type = other DNA
cagaaaaaattccaaaaagaaaaaacctactagcagttaaggaggaaaaaaatcagcaattctaccagataagtaaggttaacatttatttgatcttcag

SEQ ID NO: 792 - DNA, 100 bp, synthetic construct
  source 1..100: mol_type = other DNA
atgaaaacctgctaaaaataagaaaagtaatcaattttgtatcttttaaaaaatgtaatgataataataataaaagtcagaaaaaagaaaagggaaaact

SEQ ID NO: 793 - DNA, 100 bp, synthetic construct
  source 1..100: mol_type = other DNA
tctatatattattttatatataaaagaataattaagattattaacataataatttttaaaaagtatttaggttccagttttatctattctgaataatgct

SEQ ID NO: 794 - DNA, 100 bp, synthetic construct
  source 1..100: mol_type = other DNA
gtaaataaaaggaaaaaatgagccaacaacctgaacagacaccttaccaaagaagatatacagatggcaactgagcatatgaaaagatgctccacatata

SEQ ID NO: 795 - DNA, 100 bp, synthetic construct
  source 1..100: mol_type = other DNA
gaaaaaaaaaaaagaagaacaacactagaaatggtaaataagagggtaaaaatgaaatacactttttcttattttgagtctctttaaaaaatcattggct

SEQ ID NO: 796 - DNA, 100 bp, synthetic construct
  source 1..100: mol_type = other DNA
atagaatatagctatatcactgacatggatgcacaagctactgttttaaaataagtttatcaatgctagtgtagcaatttggtcacgtaaatgcattttt

SEQ ID NO: 797 - DNA, 100 bp, synthetic construct
  source 1..100: mol_type = other DNA
tcttcacagcctaagaacaggcttcctctgtgtaaagaaataaaagaaaacacaagcatgggcagaagtcagtagaacaattaggaggctcttacagtag

SEQ ID NO: 798 - DNA, 100 bp, synthetic construct
  source 1..100: mol_type = other DNA
caggtaaatctattacaacatttagggccaggtgcggtggctcatgcctgtgatcccagcactttgggaggccaaggtgggtggatcacgagttcagggg

SEQ ID NO: 799 - DNA, 100 bp, synthetic construct
  source 1..100: mol_type = other DNA
acccattaactcgtcatttacattaggtatatctcctaatgctatccctcccccctccccccaccccatgacaggccccgatgtgtgatgttccccaccc

SEQ ID NO: 800 - DNA, 100 bp, synthetic construct
  source 1..100: mol_type = other DNA
tcgggggaataaatttttaaaaaaagcaaaatgagtttcttcagaatatcacatatacctgtttttcaaatgtaaatacatcttaaaatgaattatcagg

SEQ ID NO: 801 - DNA, 100 bp, synthetic construct
  source 1..100: mol_type = other DNA
cttaactatctcaggtttaaaaaaagctgacaatttttttttaagtctccagattctgcagctaagtaagtacttgaagggaaagggtgtcagtctcctc

SEQ ID NO: 802 - DNA, 100 bp, synthetic construct
  source 1..100: mol_type = other DNA
aaaatagaatatagctatatcactgacatggatgcacaagctactgttttaaaataagtttatcaatgctagtgtagcaatttggtcatgtaaatgcatt

SEQ ID NO: 803 - DNA, 100 bp, synthetic construct
  source 1..100: mol_type = other DNA
cagtcactttcaattgccaaccttgttttaaaaaagaagcatcagcactccctgaaatccctctccgtttttcttactctattcttatgctatgcatccc

SEQ ID NO: 804 - DNA, 100 bp, synthetic construct
  source 1..100: mol_type = other DNA
tagttaaataaataagaaaataaacagatcgagctggaccactattttggccccttttccttctcatgtgtctggaatacaaatgcctagaggtaaaact

SEQ ID NO: 805 - DNA, 100 bp, synthetic construct
  source 1..100: mol_type = other DNA
actaaaaaaatggtttataacaacaaatgccagttaatatataaagcataaagtaatgtttgtatgccttgaaatgagtataattgattaaacaagtata

SEQ ID NO: 806 - DNA, 100 bp, synthetic construct
  source 1..100: mol_type = other DNA
tactcctacaccatgcaaaagttaaaaaaagaaaacacaaaaaacatacaaaacgtgttaattgattacttatcagtgaggcttctagacagtaggctat

SEQ ID NO: 807 - DNA, 100 bp, synthetic construct
  source 1..100: mol_type = other DNA
atgtttttgatataaaaaaagaaacttcatgtcttcaaatctttggggattcctaaaatatctatttactaattgcatgctattatttttattcaaaacc

SEQ ID NO: 808 - DNA, 100 bp, synthetic construct
  source 1..100: mol_type = other DNA
actaaactttgttggtaaaaaaaataaaaattaatgataaataaaaaataaactgctgacttaagttgatttataattctgtatctcataaaattggaat

SEQ ID NO: 809 - DNA, 100 bp, synthetic construct
  source 1..100: mol_type = other DNA
aatggtctgactctgtcacccaggctggagtgcagtggtatagtcacagctcaccacaacctcaacctcccaggctcaggtgatcctcccactttagcct

SEQ ID NO: 810 - DNA, 100 bp, synthetic construct
  source 1..100: mol_type = other DNA
agactgtgatatcaatctctgatattatgatatcacagttatcataatttatatgtctgatataaatttttaaaagattaaaaaaaccattgctttcggc

SEQ ID NO: 811 - DNA, 100 bp, synthetic construct
  source 1..100: mol_type = other DNA
atgaaaacccacttttccatgtcaaaaaaaaaggtaaaaaaaaaaggcagccgggcatggtggctcatcctgtaatcccagcactttgggaggccgaggc

SEQ ID NO: 812 - DNA, 100 bp, synthetic construct
  source 1..100: mol_type = other DNA
cacggactaataaaaaaaaattgttaaaagtaaccccatattttcaatcttttaaaaatgtccattattgatcctatatatctccatagcttccatcttt

SEQ ID NO: 813 - DNA, 100 bp, synthetic construct
  source 1..100: mol_type = other DNA
agtataaagaagaagaagaagggggcgagggggaaacaatggctgggtgtggtgggtcacacctgtaatcccagcagtttgggaggccgaggcgggtgga

SEQ ID NO: 814 - DNA, 100 bp, synthetic construct
  source 1..100: mol_type = other DNA
aaggaaagcctcttttccacaaaaaagggggtaaaaaaacaagaataacatcagctacctttgttgcgttaattttgtagattaagtgaaataaacatgg

SEQ ID NO: 815 - DNA, 100 bp, synthetic construct
  source 1..100: mol_type = other DNA
aaatatatatatatatgcagtattagagcaaaggaccaataagagataaaaactaactgaactacctcttagtgcctggaatttaccttttcctgactta

SEQ ID NO: 816 - DNA, 100 bp, synthetic construct
  source 1..100: mol_type = other DNA
tgatttaaaaaatttaaaatttttaaatataaaaataaaaataaaatatttaggatattaatacgatacaaggtagacttcaagccaaaaccattagcta

SEQ ID NO: 817 - DNA, 100 bp, synthetic construct
  source 1..100: mol_type = other DNA
aaaaaaaaaaaagcaagaaaagaaacaggcttttgctgaggatccactcctgcttcccctgttgggccattcctgttgtgttgtgtttgatgttagaaac

SEQ ID NO: 818 - DNA, 100 bp, synthetic construct
  source 1..100: mol_type = other DNA
ttgcccctcaaaaagagtatgtatggtgggccctctgtatccacagattctgcatctgcagattcaaccaacctcattgaaaacattcaggaaaaaaaca

SEQ ID NO: 819 - DNA, 100 bp, synthetic construct
  source 1..100: mol_type = other DNA
tgggcaatatagcgagacctcgtctctacaaaaaatacaaaaaaattagccaggcgtggtggcgcctacctgtattccacagtgtatatttgccacattt

SEQ ID NO: 820 - DNA, 100 bp, synthetic construct
  source 1..100: mol_type = other DNA
tgatgctatgtgtttttaaaaaattttttgtttatttattttttcagacggagcttcactcttgttgcccaagctggagtacagtagcacgatctcagct

SEQ ID NO: 821 - DNA, 100 bp, synthetic construct
  source 1..100: mol_type = other DNA
tggcaaaaaaaaagtcttaaaaaatgaaaaggaagggtatatgggagaaaattaggcagtacaggtgagtagggagaagatcctgcaaggccttacaggt

SEQ ID NO: 822 - DNA, 100 bp, synthetic construct
  source 1..100: mol_type = other DNA
tttgacccattacccatctaagttagatgcttttttaaatgttttttaatttttaaatttttaatttttttcattatttattttttatttttgagacgga

SEQ ID NO: 823 - DNA, 100 bp, synthetic construct
  source 1..100: mol_type = other DNA
gaaaaaaaaaagaagaaaagaaaaaaaaaaagaaaagacaagacaagaccaagttctgagagtgcttgaagaagcggtactaggagaagactgcactgcc

SEQ ID NO: 824 - DNA, 100 bp, synthetic construct
  source 1..100: mol_type = other DNA
ctccacagaaaattttaaatcatgtcaatttcttttttttttttttttttaatcctcttgggatttcagtttacattaagtaaaatctatagatcaattt

SEQ ID NO: 825 - DNA, 100 bp, synthetic construct
  source 1..100: mol_type = other DNA
acctggttcatctcattgggactggttggatagtgggtgtagcccatggagggtgagccaaagcagggtggggcatcgcctacctgggaagtgcaagggg

SEQ ID NO: 826 - DNA, 100 bp, synthetic construct
  source 1..100: mol_type = other DNA
aaaaaaatgctttgcatcccacaagaactagatatagacaagtgccatttttgctacacagaatgctttaaaaaaaaaaatggtgggaaatagagaaggg

SEQ ID NO: 827 - DNA, 100 bp, synthetic construct
  source 1..100: mol_type = other DNA
gaaaaatctggccatttagagtgtctaaagcaatggaagaccttggcgttactgcttgattgccttgatttatagaacctgccttaatttgactaagaaa

SEQ ID NO: 828 - DNA, 100 bp, synthetic construct
  source 1..100: mol_type = other DNA
ccaaaaagaaaatacaaatcttacctgaagatcttctgagaatatgataagtaggaaagtacttaacctagagtaggaaagtattaataaaagaattagg

SEQ ID NO: 829 - DNA, 100 bp, synthetic construct
  source 1..100: mol_type = other DNA
taaaaagaaaaatagtaggctaataagggaaggctattcagatgttgtattagttttgaactatatcttgtagaatgtgatcaaccaaggcaaagctgac

SEQ ID NO: 830 - DNA, 100 bp, synthetic construct
  source 1..100: mol_type = other DNA
acccccgcacctccgcaaaaaagctaccacttgtagctgggtgcagtggctcacgcctgtaatcccaacactttggggaggccaaggcacaaggatcact

SEQ ID NO: 831 - DNA, 100 bp, synthetic construct
  source 1..100: mol_type = other DNA
cctaccccaaaaaaagaaagaaaaaccataagcctgtgtgtgtgctccctggacccttcttttccgcaaaaccttgctgaaatcagagacaaggaccttc

SEQ ID NO: 832 - DNA, 100 bp, synthetic construct
  source 1..100: mol_type = other DNA
gcaaaaaaaaaaaaaaaaatgcatacatataatttataagtccaacatgctctgttttcttaagtcaaataaaatagaagccatagttgttatgagtaga

SEQ ID NO: 833 - DNA, 100 bp, synthetic construct
  source 1..100: mol_type = other DNA
gtaattgggtaacaattttccataaattgaaatgagaaatgttagaaacacacaaccagttaacagtaagtggcacaacaaaaacagcaaaagcccacat

SEQ ID NO: 834 - DNA, 100 bp, synthetic construct
  source 1..100: mol_type = other DNA
gaagaggcatctgtgcccagctcgtggcctgttctttgcacttgcggtggagatcctcttctcccacagctgtccccccggggcctgctcccaggtgggg

SEQ ID NO: 835 - DNA, 100 bp, synthetic construct
  source 1..100: mol_type = other DNA
ctgaataaaaataaataaataaaaaataaatgtaaaaaaaaaaaagaccatcatagtactgtgaagagcctggtcatcatccttttttatgtaaggagta

SEQ ID NO: 836 - DNA, 100 bp, synthetic construct
  source 1..100: mol_type = other DNA
tccccaacaaaacaagagagaaatagtcctcatttactatttaataacccagtgtccttaaacaatcttaaacatgctgagaagtttaaagaatagtaca

SEQ ID NO: 837 - DNA, 100 bp, synthetic construct
  source 1..100: mol_type = other DNA
cccacaacccaccaaaaaagtattgaggatatagatacaaccaatttcaagctcaaactgagatcaatagtgtcataacaattctactggtttacataaa

SEQ ID NO: 838 - DNA, 100 bp, synthetic construct
  source 1..100: mol_type = other DNA
aaaaagtaattttttttcttaatatacaaaataaaaataaataatttctaccctgtttaaaaatctcacctccagatcctccccaaagttagcaggacag

SEQ ID NO: 839 - DNA, 100 bp, synthetic construct
  source 1..100: mol_type = other DNA
actaaaaaagggtttagagaactaaaggaaacatatgataggcacataacaagccaggatgcaacttctgctataagacataaagcacaattatctatta

SEQ ID NO: 840 - DNA, 100 bp, synthetic construct
  source 1..100: mol_type = other DNA
ctaatgaaggacaagaaaaaggagactgtcctggagagatgaggactgagaaacccaacccagcccctggctccaaggagtcccggcccagccctggaga

SEQ ID NO: 841 - DNA, 100 bp, synthetic construct
  source 1..100: mol_type = other DNA
caaaccactctctgagtgactctcttcatctgattaaatgaagatattagcagttcataggactgttgtgacaaagcaggtcaccaacaaatgggagctg

SEQ ID NO: 842 - DNA, 100 bp, synthetic construct
  source 1..100: mol_type = other DNA
aaaaacggaaacaaaaaaataggaatttgatggggtggggttggagatgagcagtgttctgaaggcatttttgagtaattattacatatactgtacactg

SEQ ID NO: 843 - DNA, 100 bp, synthetic construct
  source 1..100: mol_type = other DNA
ccactcccctcccccgcccaaccaaaaaataaataaataaagtaggtagaaaagagaaagaagcttcagttataaagactggatagaaggtaaaaccatt

SEQ ID NO: 844 - DNA, 100 bp, synthetic construct
  source 1..100: mol_type = other DNA
ctgaattataaagaaaaaaaaactaataaattcaataaagttgcaggatagaaaaatcaacatccactaataaactatctaaaaaggaaattagtaaaac

SEQ ID NO: 845 - DNA, 100 bp, synthetic construct
  source 1..100: mol_type = other DNA
catgcaggtaaataaaacaaatcaaaactagcaaacaaaactaattaagaatactaggagggaaggaatgattggactaatgaactgagaaatggaaaat

SEQ ID NO: 846 - DNA, 100 bp, synthetic construct
  source 1..100: mol_type = other DNA
tagtaagaaagaaaaaaaaaaaagtacatggggttcatactactttgtagttttcgttaaatgaaacactctcacacaaaaggtatctccagaatttaca

SEQ ID NO: 847 - DNA, 100 bp, synthetic construct
  source 1..100: mol_type = other DNA
ggtcttcgtggtttaagaacaggttttctctgcttatttttattaaaaaaaaaaaaattatgtgagtcagtggttctcaagcagcagtgattgtgccccc

SEQ ID NO: 848 - DNA, 100 bp, synthetic construct
  source 1..100: mol_type = other DNA
tgctaaaaaaaaaaaaaataatcaattgggtataataaatcagtcatccatttctcatccccacaatcattcctgtctgacaaaaaagtttaggagagtt

SEQ ID NO: 849 - DNA, 100 bp, synthetic construct
  source 1..100: mol_type = other DNA
aaaaaaaatgaaagaaagaaaggaagataggaaggaaggaaggaaagagagagagaaagaaagaagaaaagaagaaaagaaagaaagaaagagagaaaga

SEQ ID NO: 850 - DNA, 100 bp, synthetic construct
  source 1..100: mol_type = other DNA
attattaaaagaaaaaaattaaacagcattgccgtatgatctagtaatttctattcagggtatacaccgcaaagatttgaaaacagatgactcaaacaga

SEQ ID NO: 851 - DNA, 100 bp, synthetic construct
  source 1..100: mol_type = other DNA
taaaaatttttaaaaataaataaatacataaataaataaatgtgtgtatatgaatccatgtgcatgcacgtatgtgtaaatatttctccaggtatccatc

SEQ ID NO: 852 - DNA, 100 bp, synthetic construct
  source 1..100: mol_type = other DNA
caccatgaaaaataaataaataaaataaattcaagctacaaatgaacgtaaatcctaatacgattgccttatggccaagagatttactcctagttcttct

SEQ ID NO: 853 - DNA, 100 bp, synthetic construct
  source 1..100: mol_type = other DNA
ggaggccttgaatttgatttacttttcccacttcaatcccaaatctaaccccatttacgtctcttgaactagttagctctgggggcagcaggcagtggcc

SEQ ID NO: 854 - DNA, 100 bp, synthetic construct
  source 1..100: mol_type = other DNA
atgaaaaactgaaggaaaaaaacaatgcaacatgtgattctaaagtggatcctcctattataaagaatattctctgggcatggtggctcacatctgtaat

SEQ ID NO: 855 - DNA, 100 bp, synthetic construct
  source 1..100: mol_type = other DNA
atgaaaacctgctctaccctccccccaaaaaatatgtcttgattgcttttgctgatgttatgttggaaacatatcctatggcagatgtgatctgatgacg

SEQ ID NO: 856 - DNA, 100 bp, synthetic construct
  source 1..100: mol_type = other DNA
ctaggagttcgagaccagcctaggcaacatggcaagaccctgtctctacaaaaaatatttaaaaaatttagctgggcatggtggtgcttgcctgtagtcc

SEQ ID NO: 857 - DNA, 100 bp, synthetic construct
  source 1..100: mol_type = other DNA
acattaaggcaatctattgatggtaaacttttatcagatgccaatgtagtctcccaagatttcctggaggggaaatggataacaacactgaacttactga

SEQ ID NO: 858 - DNA, 100 bp, synthetic construct
  source 1..100: mol_type = other DNA
tgatgaagtcaaatgaacaattccttacattttgtttgtgcttttggtaacttgcttaagagttctttcccataccagtgtcataacctatagtttcttc

SEQ ID NO: 859 - DNA, 100 bp, synthetic construct
  source 1..100: mol_type = other DNA
ttcactagattttagaatagtagacttaagtcttttaccaactgcctgaccttgagaaaaaaatatgaacctctctgaatcttactttcctcccctttgt

SEQ ID NO: 860 - DNA, 100 bp, synthetic construct
  source 1..100: mol_type = other DNA
aaaaataaagtaaaattatgatggaggtcatggtacctcccagagttgtgcagctcatgttttgcacaaccatttaggggttctaatggagctctgggat

SEQ ID NO: 861 - DNA, 100 bp, synthetic construct
  source 1..100: mol_type = other DNA
atcctgggttcttctccaggcttcgtgacattcagtcattcattcatttcttcactaagcattgcacagttcccctgaaccaggcacaccaggcactggc

SEQ ID NO: 862 - DNA, 100 bp, synthetic construct
  source 1..100: mol_type = other DNA
caaaaaagtttaaaaaagaaaaaaaataggggactgattgaataaactatggcgcagtaagatgcagagataaaaatgcgaattttgtcaagaaccaaga

SEQ ID NO: 863 - DNA, 100 bp, synthetic construct
  source 1..100: mol_type = other DNA
cctctgcctcccgggttcaaacgattctcctgcctcagcctcctgactagctgggactacagacgcgtgccaccacacctggctaatttttgtattttta

SEQ ID NO: 864 - DNA, 100 bp, synthetic construct
  source 1..100: mol_type = other DNA
aagaaaaaaagaaaaaaccaaaagcagtgcattaggggcaattcctccccctgcctcctctctccagtgctgatgggctgagtgtggggaaaggcggctc

SEQ ID NO: 865 - DNA, 100 bp, synthetic construct
  source 1..100: mol_type = other DNA
aaataaataaataaatataaatcttttgcatcaaaggacattatcaagaatgtgaaagacaacctacagaatgggagaaaatattaacaaatcatatatc

SEQ ID NO: 866 - DNA, 100 bp, synthetic construct
  source 1..100: mol_type = other DNA
caccccccgaaaaaagaaagttggtagattggtagtatacaggatatatcagtatcctttgggtgtttaggtataaggagatctgcttagaaattataac

SEQ ID NO: 867 - DNA, 100 bp, synthetic construct
  source 1..100: mol_type = other DNA
atatctgagataggcctcagttaatttagaaagtttattttgccaaagttgaggacacgcgcccatgacagcctcaggaggtgctgatgacatgcgccaa

SEQ ID NO: 868 - DNA, 100 bp, synthetic construct
  source 1..100: mol_type = other DNA
tatcactgttggtcaaatgatagaagtcatacttgggatgtgtggctattgttttgctttgtgacttacagttctctaaagtagatatgacattatgggg

SEQ ID NO: 869 - DNA, 100 bp, synthetic construct
  source 1..100: mol_type = other DNA
gttaaattaaaaaatttttaagttattttaaaaatataaaaaacaagatttgactgtattctgccttgcgccactcttgtttgtctttcactagtgcaaa

SEQ ID NO: 870 - DNA, 100 bp, synthetic construct
  source 1..100: mol_type = other DNA
gggtgcaagagagagttccactcccagagagaggggtgaggggatgagatggtgtgagtagcagacttgggtgccagtgagcaaacaaggaagaggaggc

SEQ ID NO: 871 - DNA, 100 bp, synthetic construct
  source 1..100: mol_type = other DNA
cgaattccaaaagccccatcttcatagtacccgggctctaaaacaaaccaaatcccaaaaatgagaagcagcccacgatgaagatgtctacagagagaaa

SEQ ID NO: 872 - DNA, 100 bp, synthetic construct
  source 1..100: mol_type = other DNA
tcctgatacccctcaaaaaggggcacattttgacacagagacagacacgcatactgggaaaatgctgtatgaagctgaaggcagagattggggtgatgct

SEQ ID NO: 873 - DNA, 100 bp, synthetic construct
  source 1..100: mol_type = other DNA
ttttttttttgcagagggggtggactttctggttttaaaaaaaaaaaaaaaaaaaaaaaaacccctccacaaaaatttttaacaaaaagtttaaatgtaa

SEQ ID NO: 874 - DNA, 100 bp, synthetic construct
  source 1..100: mol_type = other DNA
tcacaaaaaaaaaaaaaaaaaaaaaaaaagcaaatccttaatatgattttcttctcacaaaggaagcaaatcctgctctgctcacttccataaatattaa

SEQ ID NO: 875 - DNA, 100 bp, synthetic construct
  source 1..100: mol_type = other DNA
aagggagataaagtttaaaaatgaaaaaaatagggaataaaaagctctagccctaccatccaattggctgggggaatttaaataaataaataaataaata

SEQ ID NO: 876 - DNA, 100 bp, synthetic construct
  source 1..100: mol_type = other DNA
tgtcaactttcttttttttcttttctttacttttctattttttttttgagatggagacttgtcctgtcgcccagggtggaatgcagtgatgcgatctcgg

SEQ ID NO: 877 - DNA, 100 bp, synthetic construct
  source 1..100: mol_type = other DNA
ttaaaaataaaaacaaaaacctaagccataagtcctggagaagaggtacagagatgctgtatcactcaagaggaatgcctgggtttagaaaatgggcatc

SEQ ID NO: 878 - DNA, 100 bp, synthetic construct
  source 1..100: mol_type = other DNA
cccaccaaaaaaaaagtctacctttggtgaaatgacatcatgtctgggatttgctttaacatatttcagcgaagcaacctatgaaatgggagaaaaatat

SEQ ID NO: 879 - DNA, 100 bp, synthetic construct
  source 1..100: mol_type = other DNA
atctttgaagtatctccacaatcatctgtggggtacataatctacagccggagatacttaaggctttttattttgtgcctggtataagatggcagatgtg

SEQ ID NO: 880 - DNA, 100 bp, synthetic construct
  source 1..100: mol_type = other DNA
ttgcacatctgtgttctagatgtacaattctagatattttcagttttactcaacacaaatttcttcactcttgtcatctgctaactttattcatagtgtg

SEQ ID NO: 881 - DNA, 100 bp, synthetic construct
  source 1..100: mol_type = other DNA
tcttagtcttcatttggaatttataaaaaattttaaaaatcaccacattttccaaaagtttatgccagaaaatcattcactatttaaaaatgaagtgcaa

SEQ ID NO: 882 - DNA, 100 bp, synthetic construct
  source 1..100: mol_type = other DNA
atgaaaacctgattttccacaataaagaaaataaaacaataaataaaattttaaacaaagatttatagagctaaaacaataaaatgcctaaagtaaagca

SEQ ID NO: 883 - DNA, 100 bp, synthetic construct
  source 1..100: mol_type = other DNA
atgaaaaccccattttccatgacaataaaaaaaagaaaacaataaataaaatttaaaaataatttatctaaatgtataaaatgcctaaagtaaaacaaga

SEQ ID NO: 884 - DNA, 100 bp, synthetic construct
  source 1..100: mol_type = other DNA
ctgaagaaaaaatgataataatcaaggtaaaatcgcagtgcttgatttatggcatgacctttgacagaagcagtaaaacttttgtatggaagaaaatcag

SEQ ID NO: 885 - DNA, 100 bp, synthetic construct
  source 1..100: mol_type = other DNA
aagaaaaccaaccaaacaaacaaaaaaaagctgtattgtatacttaataatttgctaaaagagtagatcttatgttaagtgttcttataataaacaaaca

SEQ ID NO: 886 - DNA, 100 bp, synthetic construct
  source 1..100: mol_type = other DNA
ttatgccactactgccttctagcctttgtggtttctgatgagaaatcagctgttaatcttactgaggatctcttttatgtgagacgttgctgctctcttg

SEQ ID NO: 887 - DNA, 100 bp, synthetic construct
  source 1..100: mol_type = other DNA
atgaaaaactgcttttccacagggggaaaatactgtttactgcccatctttgaaaaacattttacttagagcataaacttgaagctagatccttttaacc

SEQ ID NO: 888 - DNA, 100 bp, synthetic construct
  source 1..100: mol_type = other DNA
cttatgatgtttgttgccaatgatagattgttttcactgtgcaaaaattatgggtagttttggtggtcttgatgcagttgtaagcttggggtatgaaggt

SEQ ID NO: 889 - DNA, 100 bp, synthetic construct
  source 1..100: mol_type = other DNA
gcccccaaatataaaaaaataataaggcattcacccctgaactttagcagggcttccaatcgcctttaagcactcatttaaaagaaaagtcttttattcc

SEQ ID NO: 890 - DNA, 100 bp, synthetic construct
  source 1..100: mol_type = other DNA
gtatattgttaaataattttttataattaaaatgaaagaaactatcaacagagtgaacagacaacctacagaatgggagaaaatatttgcaaactatgct

SEQ ID NO: 891 - DNA, 100 bp, synthetic construct
  source 1..100: mol_type = other DNA
caaagggaaaaaaataagttgtattattattattattattttgagacagagtttcgcgcttgttgcctaggctggagtgcaataccacgatctcagctca

SEQ ID NO: 892 - DNA, 100 bp, synthetic construct
  source 1..100: mol_type = other DNA
ttagaaaaaatatgtatagacagcacatcaatcatgattccaagttgatagttgcttagaaagatttttatacattaggtactcttagtacaaatatatc

SEQ ID NO: 893 - DNA, 100 bp, synthetic construct
  source 1..100: mol_type = other DNA
attttattttattattattattttttgagatggaatctcactttgtcacccaggctggagtgcagtgttgcgatcttggctcacttgcaacccccactgc

SEQ ID NO: 894 - DNA, 100 bp, synthetic construct
  source 1..100: mol_type = other DNA
ccacccgccaaaaaaaactatattaggaaaatttataatggaagcaaaaatggattagatagggtatttttgttgatttctacagaagaataaactgatt

SEQ ID NO: 895 - DNA, 100 bp, synthetic construct
  source 1..100: mol_type = other DNA
tcccctcaaaaataaatttttttttttttttgagacagagttgtcgctcttgttgcccaggctggagtgcagtggcgcgatcttggctcactgcaacctc

SEQ ID NO: 896 - DNA, 100 bp, synthetic construct
  source 1..100: mol_type = other DNA
gtgataggaaaattttcgccagcatagtaagagcaatttgggtttcccaaagtgcaaggtgaatatttcaatgggtaaaacaaataattttcaatgaaaa

SEQ ID NO: 897 - DNA, 100 bp, synthetic construct
  source 1..100: mol_type = other DNA
caggaagaaaagaagaaatacactatacactacccatgaattatcccaaaaatgaaattaacatttataattgcataaaaattattaggaataaatttaa

SEQ ID NO: 898 - DNA, 100 bp, synthetic construct
  source 1..100: mol_type = other DNA
gaaagtgaaaatagaaaataatatgaatagtcctctattggaaggatgattaataaatgatacccctgtactcatagctccatcatatttgactgtaagg

SEQ ID NO: 899 - DNA, 100 bp, synthetic construct
  source 1..100: mol_type = other DNA
ctgaatatttcagtattaaaaaaaacagaggaaatgaaagtgccctctattggcaggtttaactgctttatactctcttccactattctgttggatgagg

SEQ ID NO: 900 - DNA, 100 bp, synthetic construct
  source 1..100: mol_type = other DNA
aataaaaaaaaaacactttaaaaaatatttttaaagttcacttaagttgctcattttataaaatggagtttttcatatttatgttggatttcattacttt

SEQ ID NO: 901 - DNA, 100 bp, synthetic construct
  source 1..100: mol_type = other DNA
acacgctacaaatacctgagactgcgtaatttataagaaaagaggtttaattagctcacggttctgcaggctgtacaagaagcacagcagcttctgttca

SEQ ID NO: 902 - DNA, 100 bp, synthetic construct
  source 1..100: mol_type = other DNA
ccttactggaagttgaaaggtagctgttattatgatcggcgctgggtctggatgtgtggtgttcaaaacacgggctgctgggcagttcgctttcgttttc

SEQ ID NO: 903 - DNA, 100 bp, synthetic construct
  source 1..100: mol_type = other DNA
acacaccaaaaaacaaacaaaaaaaaacaaaaaaacccaccttaaacctacttttacactattctgtaactgaagaattatcatttcagttgagcaatct

SEQ ID NO: 904 - DNA, 100 bp, synthetic construct
  source 1..100: mol_type = other DNA
ctggccaccctgcaaaaaagagaatggaatattctagttaattaaatttcctgaagaatgtaaacttttaatacactttagtccttggtgaaaatcattt

SEQ ID NO: 905 - DNA, 100 bp, synthetic construct
  source 1..100: mol_type = other DNA
ccatcttatttacttccttttgatatttcaaaattcatgcagaccaggcatggtggctcatgcctgtaatacctgcagtttgggaggctgaggcaggagg

SEQ ID NO: 906 - DNA, 100 bp, synthetic construct
  source 1..100: mol_type = other DNA
ccaaaaaattgttgaaaaaaaagaagttgtgtgcttatccccaaaataaataactcactcttctcagccttttattattctgagtgagacttcatttgaa

SEQ ID NO: 907 - DNA, 100 bp, synthetic construct
  source 1..100: mol_type = other DNA
aaccctcatgagacctcaaccatgctcagatctccaaactgagaaaatacatcagctacccagtctataatattttgttacggcagcccatgctaagata

SEQ ID NO: 908 - DNA, 100 bp, synthetic construct
  source 1..100: mol_type = other DNA
ctgaattgttttagaaaaaagtgggaagcaaggggaaagagattcagtaggtgaacacatttagatcatgcaggtgaaaggaccacactactgtgggtca

SEQ ID NO: 909 - DNA, 100 bp, synthetic construct
  source 1..100: mol_type = other DNA
aataaaaatacaatacaataccatacaatacaatatataatacaatacattcctctccataaattcctcttctggaaagcccccctcaaaaaaaaattcc

SEQ ID NO: 910 - DNA, 100 bp, synthetic construct
  source 1..100: mol_type = other DNA
ccaagaaaaaaaaaacacattaacatgttcttttatctcacagaattgagcatttattccctgtcaggtaagaaatatattaggtgaaagtggcctttca

SEQ ID NO: 911 - DNA, 100 bp, synthetic construct
  source 1..100: mol_type = other DNA
gttaaagaaaaaaaaaatcaaacatttagaaaatcttgtttcctctgtctcccctaacttttgggggagatggagtttttgtttttgtttttgtattttt

SEQ ID NO: 912 - DNA, 100 bp, synthetic construct
  source 1..100: mol_type = other DNA
taaataaagaaagaaaaagaaaaaaaaacgtcttcctcaatcaaatccgaggtggttccttcccccaccaggctggctgggtggggagagaaggcttgaa

SEQ ID NO: 913 - DNA, 100 bp, synthetic construct
  source 1..100: mol_type = other DNA
ctgaaaacaaaaattttttttatagagatggggtctcactttgttgcccaggctggcctcaaactcctgagctcaagcagtccacctacctcggcttccc

SEQ ID NO: 914 - DNA, 100 bp, synthetic construct
  source 1..100: mol_type = other DNA
ggggaaaaaaaaaaggaaaaaaaaactcatttggagtttaaaatataattaattaaaaattaatcctgtggggtcacgtatctaagggagactttaaccc

SEQ ID NO: 915 - DNA, 100 bp, synthetic construct
  source 1..100: mol_type = other DNA
tggtacatgagattgggcaggaagaaatgtggagaatagagtcaccagaaccacccatgtggaagagcactagtgtacgagaaattatggaagagccttg

SEQ ID NO: 916 - DNA, 100 bp, synthetic construct
  source 1..100: mol_type = other DNA
atatgtggtaatccaacaatagaaattatttttaagtttgtgtgttcctttttctgttcaatggtgcttttgatattgttgtaaagcagtgactagcaga

SEQ ID NO: 917 - DNA, 100 bp, synthetic construct
  source 1..100: mol_type = other DNA
atataaagctgttaaaaaatcagattgacttcatttagggtgtttcttacagatatcgtttaagttttcggttctgcttgtaaacgcttcaatcgctcat

SEQ ID NO: 918 - DNA, 100 bp, synthetic construct
  source 1..100: mol_type = other DNA
attctcctgcctcagcctcccgagtagctaggattacaggcatgcaccaccacgcctggctaattttttttgtatttttagtagagacaggtttctccat

SEQ ID NO: 919 - DNA, 100 bp, synthetic construct
  source 1..100: mol_type = other DNA
cacgtgaaaaaaaaaattataattctacccagagataatgcactattaatatgtgggcaatcatccctgtggttttccttctccttatacttgcccccac

SEQ ID NO: 920 - DNA, 100 bp, synthetic construct
  source 1..100: mol_type = other DNA
atgcaagtttacaaaaaccaaaactatgtacacaaattacatgctaaaaaacccaaatactaaaaattatgaacatgactgagtgaaactatgagtcttt

SEQ ID NO: 921 - DNA, 100 bp, synthetic construct
  source 1..100: mol_type = other DNA
cactttgggaggcaaatcccaaggtgggcagatcacctgaggttgggagttcgagaccagcctggctaacatgatgaaaccccgtctctactaaaaatac

SEQ ID NO: 922 - DNA, 100 bp, synthetic construct
  source 1..100: mol_type = other DNA
cgaggtattaaaaaaataaaataaaataaacaaccagatctcaggtgaactcagagcgagaactcactcatcaccaaggggatgacgcaaagccattcat

SEQ ID NO: 923 - DNA, 100 bp, synthetic construct
  source 1..100: mol_type = other DNA
aaagaagtttaactgactcacagttccacatggctggggaagcctgaggaagcttacaatcatgggggaaggcggaagagaagcaaggcacgtcctacat

SEQ ID NO: 924 - DNA, 100 bp, synthetic construct
  source 1..100: mol_type = other DNA
aaaacaataaaataaaataaaataaaagttgcttaaatagaatcaggtgcctgtctccaggcttctctgacaggcgggaacagggaggcggggggcccaa

SEQ ID NO: 925 - DNA, 100 bp, synthetic construct
  source 1..100: mol_type = other DNA
tcctaattgataaaataaaaatatttttgaaagggaagaattaaaaatcatgggattaaatgacaggaggagccaatctgggtattcataaaatgactga

SEQ ID NO: 926 - DNA, 100 bp, synthetic construct
  source 1..100: mol_type = other DNA
cccacccccaccaaaaaaaaaaaaaaatcaggctgggcacagtggctcatgcctgtaatctcagcactttgggaggccaaggcaggcagatcacgaggtc

SEQ ID NO: 927 - DNA, 100 bp, synthetic construct
  source 1..100: mol_type = other DNA
ctgaataagaaaaaagaaaagaaaagaaattagctgggtgcgatggcttatgcctgtaatcccggcactttgggaggctgaggcaagcggatcacttaat

SEQ ID NO: 928 - DNA, 100 bp, synthetic construct
  source 1..100: mol_type = other DNA
ggtaggcagcaaatatagtgtctgtgagatttgaggctgcctttcttctctgggatagaccatcttttgattcttttcattgcgattagttggaaatttc

SEQ ID NO: 929 - DNA, 100 bp, synthetic construct
  source 1..100: mol_type = other DNA
ctgaaaagaaaaaaaaaaaagaggagaacagcagacaccagggcctacttgaggatggagggtaggagaagggagaggattaaaaaaactacctcttcgg

SEQ ID NO: 930 - DNA, 100 bp, synthetic construct
  source 1..100: mol_type = other DNA
ctgaaataaaaaaaaagaaaaacaaagctcaagtttgcctcatttggcaaatgattcccaggtgaaagctagcgttccatgttctgcctactactctcta

SEQ ID NO: 931 - DNA, 100 bp, synthetic construct
  source 1..100: mol_type = other DNA
cactcctaaaaaaaaaatggagaaacaattattatattttcagatgaaaagactgggggaatttattactggtacacttgctttacaagaaatggtaaag

SEQ ID NO: 932 - DNA, 100 bp, synthetic construct
  source 1..100: mol_type = other DNA
cccctccaaaaaacgaaattaaaaaaaaagttaaacaaaacaaaacccaggctgggcgcagtggctcacgcctgtagtcctagcactttgggaggccgag

SEQ ID NO: 933 - DNA, 100 bp, synthetic construct
  source 1..100: mol_type = other DNA
agcaggtggatcctttgaggccaggagttcaagaccagcctgggcaacatggcgaaacccatctctacaaaaaatacaaaacttagccagcacggtggca

SEQ ID NO: 934 - DNA, 100 bp, synthetic construct
  source 1..100: mol_type = other DNA
caaaaggcaaaaaaaaaaaaaaaaaaaagacccaaacagaagcctaagaatcaggtacatctttccagttggtctcttcctcttggaaaagtccatatca

SEQ ID NO: 935 - DNA, 100 bp, synthetic construct
  source 1..100: mol_type = other DNA
aaaaaaaagaaaattattgagattattggccagatgcagtggctcacacctgtaatctcagcactttgggaggccgaggtgggcggatcatgaggtcaag

SEQ ID NO: 936 - DNA, 100 bp, synthetic construct
  source 1..100: mol_type = other DNA
tgggttttttttttttttttctaatattaaaaaaaagaagaggctgggcgtggtggctcacgcctgtaagcccagcaccttgggaggccaaggagggtgg

SEQ ID NO: 937 - DNA, 100 bp, synthetic construct
  source 1..100: mol_type = other DNA
ccaccaccaccaccaaattaagaaaagccgtaagaatgtgtgattagtcctttctgagtctttaatgctttttacaataaggatgtatcgtgtttttaac

SEQ ID NO: 938 - DNA, 100 bp, synthetic construct
  source 1..100: mol_type = other DNA
caaaggaaaaaacaataaaaaggcagtaggagcaggtcattcccattcattcaaaaaacagttgtctggctagcaccgtggctctcacctgtagtcccag

SEQ ID NO: 939 - DNA, 100 bp, synthetic construct
  source 1..100: mol_type = other DNA
ccgaatttaaaaaaagaaaaaagagaattcatttttaaccataatgtgcaaatactgtatttgatgtatcctgtactctgtcacttgtcttcgagtgcca

SEQ ID NO: 940 - DNA, 100 bp, synthetic construct
  source 1..100: mol_type = other DNA
agctgccccatgggctaagccagggaaggctttctgaacaagtgagtgttgcaaacctgcaaaggttggagaggaaggtggagggacactccagaaaaag

SEQ ID NO: 941 - DNA, 100 bp, synthetic construct
  source 1..100: mol_type = other DNA
gtttttgttgttgttgttgttgtttgttttttgttttttttgagacggagtctcactctatcacccaggctggagttcagtggtgcaacctcggctcact

SEQ ID NO: 942 - DNA, 100 bp, synthetic construct
  source 1..100: mol_type = other DNA
taattttaaaaaaagaagacaagcacaattcagataagtaaaatagaattaattaaatgcacgaaagagaggaataaccaaatactttgagagctgagct

SEQ ID NO: 943 - DNA, 100 bp, synthetic construct
  source 1..100: mol_type = other DNA
tgcaaataaaataaatatattaataaaatttaaaaatgaaaagcttttgcctttttattacctcccaaaatacacacacacacacacacacaaacacaca

SEQ ID NO: 944 - DNA, 100 bp, synthetic construct
  source 1..100: mol_type = other DNA
tgaccttgttaagaggcaatttgatgtcttcctgggtgatttaagagcaacttgattgtgacaatcatgaaaatggtgtgcaaatgaatgaacttttggt

SEQ ID NO: 945 - DNA, 100 bp, synthetic construct
  source 1..100: mol_type = other DNA
tgaattaaaaaaaaaaaaaaaaaaaagaagaagttacaggttctgcccacactcaagaggaagagattatatcagggcgtgaataccaggaggcagggat

SEQ ID NO: 946 - DNA, 100 bp, synthetic construct
  source 1..100: mol_type = other DNA
ctaccacccccaaaaagcccaagtctcaagaggtagtctggaaaaaagtgtttttggatttacctacatttttttttccaagatggagtctcgctctgtc

SEQ ID NO: 947 - DNA, 100 bp, synthetic construct
  source 1..100: mol_type = other DNA
ctgtgccagctcgtggcctgttctttgcacttgtggggaaggggtccccttttcccacagccgtccccccggggcctgctcccaggtggggtctggtttt

SEQ ID NO: 948 - DNA, 100 bp, synthetic construct
  source 1..100: mol_type = other DNA
ctcacgcttaaaataataataataataaaataaaatatattttaagtctcacgcctgcaatcccagcactttgggaggctgaggcgggcagatcacttga

SEQ ID NO: 949 - DNA, 100 bp, synthetic construct
  source 1..100: mol_type = other DNA
cgcccaaaaaaataaaaatacaaaaatcagtcgggcgtggtggctcacgcctgtcatcccagcactttgggaagccgaggtgggtggatcacctgaggtc

SEQ ID NO: 950 - DNA, 100 bp, synthetic construct
  source 1..100: mol_type = other DNA
tgaattcaactgagtatccagtttcatagaaataataataacatcttctataaaatgtattcttgtgtattaacacatggggctctctagtactcctgct

SEQ ID NO: 951 - DNA, 100 bp, synthetic construct
  source 1..100: mol_type = other DNA
gtctaaaatattaaacgacaacaacaacaaaaaaatcaatggggagagctaggacatggaggcaggacattagagccatttgatttaaaaaatcatggtg

SEQ ID NO: 952 - DNA, 100 bp, synthetic construct
  source 1..100: mol_type = other DNA
gctttttattttattttgttcatttttttaatttaaaaaatagtgagaaaagaagaaaataagcccaatgccagcagaatgaaggaaataataaagataa

SEQ ID NO: 953 - DNA, 100 bp, synthetic construct
  source 1..100: mol_type = other DNA
atgaaccatctttgtttaaaaaaacgaaaacaaacaaaaaaacaaaaaaaaacttagctccatgtaaaggactttacatctaactttgtgttgaatgtac

SEQ ID NO: 954 - DNA, 100 bp, synthetic construct
  source 1..100: mol_type = other DNA
agaaagaaaaagaaaagaaaaaaaaatattttaatggagagagtcaccatgagatacaaatgcacagatgggagggagaggcagcagttctggaggagaa

SEQ ID NO: 955 - DNA, 100 bp, synthetic construct
  source 1..100: mol_type = other DNA
accttattcacgcctaaaaagtagactgactgtggggtggtcgtgttttttgtttcttgttggtaggtggtgaatgcgtttttttcgttgttttctccgt

SEQ ID NO: 956 - DNA, 100 bp, synthetic construct
  source 1..100: mol_type = other DNA
gaaagtaaaaatagccgggtgcggtggctcacgcctgtaatcccagcactttgggaggctgaggcaggcagatcatgaggtcaggagatagagaccatcc

SEQ ID NO: 957 - DNA, 100 bp, synthetic construct
  source 1..100: mol_type = other DNA
acagcaacaataaaaataaagcaataaacgtaacaacatgaatgaatcacaacgcattatgctaaggataggaagccagactcaaagggccatagaattt

SEQ ID NO: 958 - DNA, 100 bp, synthetic construct
  source 1..100: mol_type = other DNA
ccaccaaaaaatatatatatatatttttaaagaaaaatggtgaggtaactgaactgttagcatgtgccaaagttagggtcttgagaacctaaagttttaa

SEQ ID NO: 959 - DNA, 100 bp, synthetic construct
  source 1..100: mol_type = other DNA
acacctttacacctaaaaagtagactgggggcctggcgcggtggctcacgcctgtaatcccatcactttgggaggctgaggagggcggatcacgaggtca

SEQ ID NO: 960 - DNA, 100 bp, synthetic construct
  source 1..100: mol_type = other DNA
tgaatattaaagaaaaaatacagagaaatctcatacttttaatacaatcagggtttcacattgatgaaatcccccctttactttttttgaagtattgttt

SEQ ID NO: 961 - DNA, 100 bp, synthetic construct
  source 1..100: mol_type = other DNA
gtgaattttaaaaagaggagagagagaagccgcagaggatagtgcacagaactgagtccagatcccagttctgtctttgtttttttgtttgtttgtttga

SEQ ID NO: 962 - DNA, 100 bp, synthetic construct
  source 1..100: mol_type = other DNA
gggggttaaaacacagtgttacaggccaggcgtgttggctcacccctgtaatcccagcactttgggaggccgaggcaggtggatcacctgaggtcaggag

SEQ ID NO: 963 - DNA, 100 bp, synthetic construct
  source 1..100: mol_type = other DNA
ttcaaaaaacaaaacaaaacaaaacaaatggccttttatttcctagtgactgaactcttttaacatttgattaacgtccatttcaaaaatggctatattc

SEQ ID NO: 964 - DNA, 100 bp, synthetic construct
  source 1..100: mol_type = other DNA
agaaaaaaaaaaaagaaagaaattataggccgggcacggtggctcacgcctgtaatcctagcactttcggaggccgaggcaggcggatcacgaggtcaag

SEQ ID NO: 965 - DNA, 100 bp, synthetic construct
  source 1..100: mol_type = other DNA
aaaaaggtagaggagagagaggtgcgtggaagagtgagcacaagaaaggaggcatcttacagtttataaacatctgaacactggagctctatcaagattc

SEQ ID NO: 966 - DNA, 100 bp, synthetic construct
  source 1..100: mol_type = other DNA
gggggttaaaacacagtgttacgggctgggcgtgttggctcacgcctgtaatcccagcactttggtaggccgaggcaggtggatcacctgaggtcaggag

SEQ ID NO: 967 - DNA, 100 bp, synthetic construct
  source 1..100: mol_type = other DNA
catgggaaaaaaaagagagagaaaataaaattgagtcatttagtggatatagaaaattgaaaggaaaccacatactggaaacaattcaatatgcctacaa

SEQ ID NO: 968 - DNA, 100 bp, synthetic construct
  source 1..100: mol_type = other DNA
ggaaaaagaaaaggaaaggaaaggaaaggaaaggaaaggaaaggaaaggaaaggaaaggaaaggaaagaaagaaaattgactcgtttagtggatatagaa

SEQ ID NO: 969 - DNA, 100 bp, synthetic construct
  source 1..100: mol_type = other DNA
cgtggaaaagaaacagaaaagaaaagaaaagaaaattgacttgtttagtggatatagaaacttgaaactagaccatgtactggaaacaattcagtatgcc

SEQ ID NO: 970 - DNA, 100 bp, synthetic construct
  source 1..100: mol_type = other DNA
gaaaaaaaataaaaaaaaagaaaattgactcgtttagtgtatatagaaaggtgaaagaaggccatatactggaaacaattcagtatgtctacagaaattg

SEQ ID NO: 971 - DNA, 100 bp, synthetic construct
  source 1..100: mol_type = other DNA
ttctaaataaatctatattttttaaaaaaagaattgattggccggccatggtggctcacacctgtaatccagcactttgggaggccgaggcaggcgggtc

SEQ ID NO: 972 - DNA, 100 bp, synthetic construct
  source 1..100: mol_type = other DNA
ttatttgagcgttttaaaagtagatgcccttagccattacgacggttcgtatttactctgaaacaagaaacacactcaaaactcagagaaaacattgttc

SEQ ID NO: 973 - DNA, 100 bp, synthetic construct
  source 1..100: mol_type = other DNA
cactttgggaggccgaggcgggttgatcacgaggtcaggagttcaagaccaccctggccaagatggtgaaaccccatctccactaaaaatacaaaaaatt

SEQ ID NO: 974 - DNA, 100 bp, synthetic construct
  source 1..100: mol_type = other DNA
actttctggagtttcaaaaacagactgtacgccaagggtcatatctttttttgtattggtttgtgtcttggttggtgtcttaggtgttaatcctacagtg

SEQ ID NO: 975 - DNA, 100 bp, synthetic construct
  source 1..100: mol_type = other DNA
acctgacataacggggttcaagactgacaacgcctcacgcccatccaaaaacgtttacatggcttccttgtctctttttttttttctgtcctaaagtcgc

SEQ ID NO: 976 - DNA, 100 bp, synthetic construct
  source 1..100: mol_type = other DNA
tagacaagttctaaaagagctgtaacactgaagatggttctcttctctggaaaaacttcccacgggaaaaacaaaaatcttcctttaaaaatttttttaa

SEQ ID NO: 977 - DNA, 100 bp, synthetic construct
  source 1..100: mol_type = other DNA
ctgaatatttaaaagaagagaagcaaatccagtctcacatagatagctggaaaagtgatcatacttgcggaaaggctggcataagggccttttgagaagt

SEQ ID NO: 978 - DNA, 100 bp, synthetic construct
  source 1..100: mol_type = other DNA
cacaaaaagaaaaagaaaaatctgtctgtactgtctattgaacataaggctgcaaaaaagataaatttagacacagtcattgacaaatttgcagaagtta

SEQ ID NO: 979 - DNA, 100 bp, synthetic construct
  source 1..100: mol_type = other DNA
gaatgttctgttactaaagagagacgtgtgggtggggtgtttcatgctttgggaggttggggtagctccacaaatgtcacccaggttgtagcggagtggt

SEQ ID NO: 980 - DNA, 100 bp, synthetic construct
  source 1..100: mol_type = other DNA
catcaacggtgtttaaaaatcagatagaaagttgtgtgtttgttgcgaggtgtgagacaacattttgtttgaacatttattttgggctgttgtaatggtg

SEQ ID NO: 981 - DNA, 100 bp, synthetic construct
  source 1..100: mol_type = other DNA
acatttttaagtattaaaagttaggcaactacaaccaaggaacttggtcatttgttatttgtaccaaatgttcacaaacttattcgggcgtggtggtgcc

SEQ ID NO: 982 - DNA, 100 bp, synthetic construct
  source 1..100: mol_type = other DNA
ccccacacaaaaaccaatttaaaaactacttatttagcaggtttttccttagcacctcttcctgtacatgacaccgtatgggggctgtgggcctgccctg

SEQ ID NO: 983 - DNA, 100 bp, synthetic construct
  source 1..100: mol_type = other DNA
caggaagaaacaagacttaaagaaaaatgtggccaggcgtggtggctcacatctgtaatcccagcactttggggggccaaggcagacggatcacttgagg

SEQ ID NO: 984 - DNA, 100 bp, synthetic construct
  source 1..100: mol_type = other DNA
atgaagggggggaaaaaaagaggaaaatctgtttagtgtagccaccttcatcaatgaccttagctagatcttcaagacaacttgttgcagtttttacaat

SEQ ID NO: 985 - DNA, 100 bp, synthetic construct
  source 1..100: mol_type = other DNA
taatgcagaaaagaagttgattttaacacaattgttcatattaaatgaggctagatttggatttatatagtttcagctgcatagctccttgactaaatgg

SEQ ID NO: 986 - DNA, 100 bp, synthetic construct
  source 1..100: mol_type = other DNA
atgaaaaacctcttttccatgaaattgaaaaaaaatgtttttgaaaaggaagaaaaaaaagaaatacctgaggctgggtaatttataaagaaaggaggtt

SEQ ID NO: 987 - DNA, 100 bp, synthetic construct
  source 1..100: mol_type = other DNA
cacattatgtaataaattttaaaaatgaaaaaataataaaaaggagaggtgttggtaccagaaggagggaaggaaagaatgagaatgccaagcagataaa

SEQ ID NO: 988 - DNA, 100 bp, synthetic construct
  source 1..100: mol_type = other DNA
ctcagacatccttattatcagtctagtgatttttgctgctgttctattccttttattttcctgttagctccacaataaccttttagtagtcatttctctt

SEQ ID NO: 989 - DNA, 100 bp, synthetic construct
  source 1..100: mol_type = other DNA
atatggagactgaacaaagaaacagaaaaagaaatgtggcctcttccttggctaaaaattttaacataacgtggtcttgagaaaaacatggtctatttct

SEQ ID NO: 990 - DNA, 100 bp, synthetic construct
  source 1..100: mol_type = other DNA
ccaatattaaatttaaaaaaattgttgtaaagattaaatgagacaatatatggtcaaatctttagcagaatacttaaaatataacaggagaggctcaata

SEQ ID NO: 991 - DNA, 100 bp, synthetic construct
  source 1..100: mol_type = other DNA
acagaaaatacttctgtaaggatgtctgtctagcaactgcctgttcaagcttggacttgtgccacccttgtagccaaggataattgatttgaacaattgt

SEQ ID NO: 992 - DNA, 100 bp, synthetic construct
  source 1..100: mol_type = other DNA
gtgcttttgtggtgcgaatagtaggtgagccgtaagtgtttttgtaattcagggtgcgggctcgtgttttgtggctgtgttctgtccggtcagttgtttc

SEQ ID NO: 993 - DNA, 100 bp, synthetic construct
  source 1..100: mol_type = other DNA
cctaacataaacggggttcaaaactgacatcgcctaacgcctacccgaaaacgtttacgtggcttccttgtctctttgttttttctgtcctaaagtcgcc

SEQ ID NO: 994 - DNA, 100 bp, synthetic construct
  source 1..100: mol_type = other DNA
acataccttggctcaccgccgacgcggtgacccttcgccagagacccttcgccgccctcctagggatcttgagggccttccttgttgttctcaccgaagc

SEQ ID NO: 995 - DNA, 100 bp, synthetic construct
  source 1..100: mol_type = other DNA
aattttccagtgcaaaaagcagttggtatgcaaaggtctacttctcgcttttttttgctgtataatcttggtggtggtgtgttattcttatagccggatg

SEQ ID NO: 996 - DNA, 100 bp, synthetic construct
  source 1..100: mol_type = other DNA
ttcacagtacttgacttactccaagaccagcaatagatagagccctagcagatccttgataacactgtctgaaaagacagagccccagggaatgagttcc

SEQ ID NO: 997 - DNA, 100 bp, synthetic construct
  source 1..100: mol_type = other DNA
attttttgtagtttaaagaatagtctacacagcaagggttacttgttttttttactggcttgtgttttagtcttaatcgttactctcacagtcgaaggct

SEQ ID NO: 998 - DNA, 100 bp, synthetic construct
  source 1..100: mol_type = other DNA
cctaacataaacggggttcaaaactgacatcgcctcacgcctacccgaaaacgtttacgtggcttccttgtctctttgttttttctgtcctaaagtcgcc

SEQ ID NO: 999 - DNA, 100 bp, synthetic construct
  source 1..100: mol_type = other DNA
ggaggttgtagtgcaaaaagcagtttgtctaccaagtgatactttcagcttttacaaatgctgaacaatatccatggtgtgttttcatgtcacctcctct

SEQ ID NO: 1000 - DNA, 100 bp, synthetic construct
  source 1..100: mol_type = other DNA
atttctttttttctggtttcaaaaatagaccgtacgctccttgttactgctttctttcattggtttgtgttttttgtggtgcccttaagtgttactgtta

SEQ ID NO: 1001 - DNA, 100 bp, synthetic construct
  source 1..100: mol_type = other DNA
cctgacatgccttggctcaccgccgacgcggatatcgccgccagggacccttcccgccctcctacgaatcttgagtgcgcttccttggtgttctcaccga

SEQ ID NO: 1002 - DNA, 100 bp, synthetic construct
  source 1..100: mol_type = other DNA
aatttttgtaatgaaaaaatagacggcaagggttattcttaaaactgcagttttgtagcttgggtggcatgttaagtgttctccttacagtcgcaacgat

SEQ ID NO: 1003 - DNA, 100 bp, synthetic construct
  source 1..100: mol_type = other DNA
tatttttgtcgttttaaaaataggttttgtttgctgcagaaacgcatactgggcgtcagcgtaagctgagaatcaggtctttgttcccatctgtaacttc

SEQ ID NO: 1004 - DNA, 100 bp, synthetic construct
  source 1..100: mol_type = other DNA
tcattaggaaaatgctaattaaaactacaatgagatatccttacacatctatcagaaaagctaaaataaaaaattgttgccggttgcagtggctcattcc

SEQ ID NO: 1005 - DNA, 100 bp, synthetic construct
  source 1..100: mol_type = other DNA
ttttttttttttttttgcggtgtggaaagatagactgcatgcagtctatcgtgttatatcctggacggcatccgaagtgtttttccttgtagttaggagg

SEQ ID NO: 1006 - DNA, 100 bp, synthetic construct
  source 1..100: mol_type = other DNA
cctgacatgccttggctcaccgccgatgtggatatcgccgccagggacccttcccgccctcctacgaatcttgagtgcgcttccttggtgttctcaccga

SEQ ID NO: 1007 - DNA, 100 bp, synthetic construct
  source 1..100: mol_type = other DNA
aatttttgtaatgaaaaaatagactcccctataagggttattcttaaaactgcagttttgtggcttgggtggcatgttaagtgttctccttacagtcgca

SEQ ID NO: 1008 - DNA, 100 bp, synthetic construct
  source 1..100: mol_type = other DNA
aaatcttgcagtgcaaaaagtgaattctgcaggaagggctactcttagtttctacttagctttctacgggtttgtagctttgctggcatgttaagtgttg

SEQ ID NO: 1009 - DNA, 100 bp, synthetic construct
  source 1..100: mol_type = other DNA
aattttgtgctggaaaacgcagattgtatgtgaagggatacttttagtagtgcataatatgggtggtgtcatgttatttttacagttggatggctgggga

SEQ ID NO: 1010 - DNA, 100 bp, synthetic construct
  source 1..100: mol_type = other DNA
ttcacagtacttgactgactccaaggccagcaatagatagagccctagcagatccttgataacactgtctgaaaagccagagccctgaggaattagttcc

SEQ ID NO: 1011 - DNA, 100 bp, synthetic construct
  source 1..100: mol_type = other DNA
attttttgtagtttcaagaatacgctgtactctaagggctacttttttctttcattgatttgtgtcttggacgtgttattcttacagtggaaggctggga

SEQ ID NO: 1012 - DNA, 100 bp, synthetic construct
  source 1..100: mol_type = other DNA
tcttcttattctcagttgagctttttctaattaaatgtattacgaaatattttcaagagtcccttaagaaaatttccacatatttcaacatgtatcttgc

SEQ ID NO: 1013 - DNA, 100 bp, synthetic construct
  source 1..100: mol_type = other DNA
gaggccgagacaggccaatcatgaggtcaggagatcgagaccatcctggctaacacggtgaaacccccgtctctaccaaaaatacaaaaattagctgagt

SEQ ID NO: 1014 - DNA, 100 bp, synthetic construct
  source 1..100: mol_type = other DNA
ctgaatttgaaaaaaaacaaaaaaaaacaaaaaaacagctgggctagtcatagtggctcacacctataatctcagcacttttgggaggccaaggtgggtg

SEQ ID NO: 1015 - DNA, 100 bp, synthetic construct
  source 1..100: mol_type = other DNA
agattaaaacagggacatagaatttgaagcttctagaatctataactacaacaaatattaagtacaccccaactgctagccagattaacagaaacgctca

SEQ ID NO: 1016 - DNA, 100 bp, synthetic construct
  source 1..100: mol_type = other DNA
aaaatgaaaaataaataaaatgaaatatcagaaacacattttaactaggcatccagtgctccacctttaaaacaaggaagtgcgctttcggctgcattaa

SEQ ID NO: 1017 - DNA, 100 bp, synthetic construct
  source 1..100: mol_type = other DNA
atcatgttttataaaaaaagacttaaagaggaaaacattatggtgcaactttaggcttaagtgattcattgtcactgtttgtttaaacattgtgtaacag

SEQ ID NO: 1018 - DNA, 100 bp, synthetic construct
  source 1..100: mol_type = other DNA
tttttttttttttttttttttttttaaagggagtctcattctgttgcccaggctggagtgcagtggcatcatctcagctcactgcaacctccacctcccg

SEQ ID NO: 1019 - DNA, 100 bp, synthetic construct
  source 1..100: mol_type = other DNA
tttaaaaaaaaaaaaaaaagttggagcgtaattctctccatcctcccaaagtgggctggacttaataacttgcttcaaatgaatacattgttttggaagt

SEQ ID NO: 1020 - DNA, 100 bp, synthetic construct
  source 1..100: mol_type = other DNA
taaataagttggtgttcagccttttactatcagttctttgagcttattagtctgcctctaagagacaggcgcaaaattaaatttccaagcttgtaggctg

SEQ ID NO: 1021 - DNA, 100 bp, synthetic construct
  source 1..100: mol_type = other DNA
gtcactcttgtccaatgagagatcataacttgaagtcggtggtctttattgtataatttatttattataaaaatgcatacaacataaaagcatcttcagc

SEQ ID NO: 1022 - DNA, 100 bp, synthetic construct
  source 1..100: mol_type = other DNA
ctgaacaaccaaaaaaacataaaaatttaactcctcctcagcttcactttggcacaatgccagaaggacctctattaagttgtgcacatttgtgcagccc

SEQ ID NO: 1023 - DNA, 100 bp, synthetic construct
  source 1..100: mol_type = other DNA
cacccccaaaaatgtgtgaaatggaaaactgcatgtatattttaccacagtgaagaaacaaaaaaaagaagttattcctctgggctccactgtaccaggg

SEQ ID NO: 1024 - DNA, 100 bp, synthetic construct
  source 1..100: mol_type = other DNA
caacagaaagatcaacagaaagattgattcaaactttcttgggcatcagaaagtaatgattcagagtttgggctctagaattagactgcccaggtgccaa

SEQ ID NO: 1025 - DNA, 100 bp, synthetic construct
  source 1..100: mol_type = other DNA
catcaataaataaataaataaaataagaaaaatgaataaaaataaaagtggagagttcaaaccaacccagtacaatcactctggaacccatctagagctt

SEQ ID NO: 1026 - DNA, 100 bp, synthetic construct
  source 1..100: mol_type = other DNA
cacaaaaaaagaaaaattaaaataaattttaagagtcctttatcaagagggcctgcctgctgccctcctggcttgtgagctgcatctgttagccttgtga

SEQ ID NO: 1027 - DNA, 100 bp, synthetic construct
  source 1..100: mol_type = other DNA
attggatcgactccattctcctcctccaggtggtgatggcaacgagcaacaggaacacactccttccccaaacacctcaccctccaccttctcaaattgg

SEQ ID NO: 1028 - DNA, 100 bp, synthetic construct
  source 1..100: mol_type = other DNA
aaccattagtgacaaaaacaggtttgtaattttggaaacctcagaaggttgcttccaatttcacagcaatatggctaaagaagaaaaaacaggtatgcta

SEQ ID NO: 1029 - DNA, 100 bp, synthetic construct
  source 1..100: mol_type = other DNA
ctatttcagtaaaaataaataaatatggtgcgcgcctgtagtcccccctactggctggcgcgggaggatcgcttgagcccaagatttccagcctgagcga

SEQ ID NO: 1030 - DNA, 100 bp, synthetic construct
  source 1..100: mol_type = other DNA
agagaaatgcttctggacgttgccaaattcccccagggaaacaaaattgccctcggttgagaaccactgagttacagggataaaattatcagatgtgttc

SEQ ID NO: 1031 - DNA, 100 bp, synthetic construct
  source 1..100: mol_type = other DNA
tccccaacaaataaagttgtaaagtggaaattgacaactaaagataaataagaaaatctataagcagagtggggttatttttaacacatctctctcagta

SEQ ID NO: 1032 - DNA, 100 bp, synthetic construct
  source 1..100: mol_type = other DNA
aaaaataaaattttttaaagaaagaaaaaataattgataataataataaaataatggttattcgaactccgttggtcatcaaggcttgtgttgcatatgg

SEQ ID NO: 1033 - DNA, 100 bp, synthetic construct
  source 1..100: mol_type = other DNA
aacttcctcctctcccgcaggattaaaaaaaagaattagctcacataactatagaggctagaaagtcccaagatctgcagggtgagtcaacaagctagag

SEQ ID NO: 1034 - DNA, 100 bp, synthetic construct
  source 1..100: mol_type = other DNA
ttgagttaatgacagattgttttcttttgttcccctagtgttctacaaagtgctctaattcactgttaatgaggctccagactgcatttccaccatttgt

SEQ ID NO: 1035 - DNA, 100 bp, synthetic construct
  source 1..100: mol_type = other DNA
aaaatacttatctattgggttatcctgctagacaaaaatcttagaaagctctaacattaatctagagtttttaaaagggcaaattgtagaatctaaagag

SEQ ID NO: 1036 - DNA, 100 bp, synthetic construct
  source 1..100: mol_type = other DNA
ttaaaacttctaaactcttaaacaaattataaatacttgatactttgaagaactgcaaaacaaaatgtttttaagttttcataaggcaaaatcattgagt

SEQ ID NO: 1037 - DNA, 100 bp, synthetic construct
  source 1..100: mol_type = other DNA
cactttgggaagctgaggctggcggatcatgaggtcaggagattgagaccatcctggccaacatggtgaaaccccgtctgtactaaaatacaaaaaatta

SEQ ID NO: 1038 - DNA, 100 bp, synthetic construct
  source 1..100: mol_type = other DNA
gtaaaaatgaaatactaataatacttcagactcatacttgtccaccagtcggggaagtgcagggacaacaccagtaatgaaggatttcccccaagtcatg

SEQ ID NO: 1039 - DNA, 100 bp, synthetic construct
  source 1..100: mol_type = other DNA
aaacttattttccaaaaataatttttaaaatttaaaaatctgaaaaaagagaagaagaattgtgacttttacaatacttgacattagatggatagagact

SEQ ID NO: 1040 - DNA, 100 bp, synthetic construct
  source 1..100: mol_type = other DNA
cctattcctccacaaaaaaaaatcccagctctgtcattaactgcctgtggagcctgggccaggttcttctctgaagtctccactgtacaaactgtaaaat

SEQ ID NO: 1041 - DNA, 100 bp, synthetic construct
  source 1..100: mol_type = other DNA
tcattaaaaagtcaggaaacaacagatgttggagaggttgtggaaaaataggaatgctttacatcgttgatgggagtgtaaattagttcaaccattgtgg

SEQ ID NO: 1042 - DNA, 100 bp, synthetic construct
  source 1..100: mol_type = other DNA
ccaccactttgggggatgtctgcactcccctctatccattcccactcagttacttccatttcactcaacaaatatcaatggacagcatcccagtgtcccc

SEQ ID NO: 1043 - DNA, 100 bp, synthetic construct
  source 1..100: mol_type = other DNA
ctcatttacatatcgttggtggctgtttttgtgctacaaaaccacaatcaagcaattggaacagagagctcatggcctgcaaagtcaaaaatattacaat

SEQ ID NO: 1044 - DNA, 100 bp, synthetic construct
  source 1..100: mol_type = other DNA
agaaacaaaaaaataaaacatggtatgatgcaatttgtttatttttaaggcatttatattagtctttgcaggggaaaaatgctctgagctaatgaacagt

SEQ ID NO: 1045 - DNA, 100 bp, synthetic construct
  source 1..100: mol_type = other DNA
aaattgtgagtgttaaaaattagaccagcctgtccaacatgatgaaaccccatctctactaaaaatacaaaaaactagccgggcatgatggcgggcgcct

SEQ ID NO: 1046 - DNA, 100 bp, synthetic construct
  source 1..100: mol_type = other DNA
aaaaaaaaaaaagagcaagcaaccctcataaaaaaatgaaataacttaaaaaaaaatagccaccctgaagatgtatagttacaggtcaatgggatagcca

SEQ ID NO: 1047 - DNA, 100 bp, synthetic construct
  source 1..100: mol_type = other DNA
ggcattttgtaaaagaaaagaaaaaaacacagagagtactaagcgcaccctgagagtttcggattcagaatgaggtggaaaagtcagaattaggtgaaat

SEQ ID NO: 1048 - DNA, 100 bp, synthetic construct
  source 1..100: mol_type = other DNA
ttgggggaataaaaaaaaaggattgcaggtgagcccccatatccctgtcatctaggcactgcactgcccatccccctgtctgcctgccagtcagtcttgt

SEQ ID NO: 1049 - DNA, 100 bp, synthetic construct
  source 1..100: mol_type = other DNA
gcaatttttttttaattaaaaaaaaattgttattttaaaacaatggactagtttttaaaatgtggatatttatagtgtttaatgatatgagacattaact

SEQ ID NO: 1050 - DNA, 100 bp, synthetic construct
  source 1..100: mol_type = other DNA
gccacatgaacatttgtaactgcaagggagtctgagaagcataggactattgctgattccaggcaaattagggttctgttagtaaggtagaggggaagaa

SEQ ID NO: 1051 - DNA, 100 bp, synthetic construct
  source 1..100: mol_type = other DNA
acggatttggaatagagtaagatagggatatatttattctcttagtagctggtgcaaagattcctttttgggggaaacgtgtctttgtaaaattacttca

SEQ ID NO: 1052 - DNA, 100 bp, synthetic construct
  source 1..100: mol_type = other DNA
catggagaaaaaataaaaggtagacacaaccaaatgttctttgagggtcaaacgttatagacccccgaagaaatgtctaccaggaaccatttctggaata

SEQ ID NO: 1053 - DNA, 100 bp, synthetic construct
  source 1..100: mol_type = other DNA
aaaacaacaacaacaacaaagaatcagaagagatactaggctatctaattcctaaatccaaacctgatatttctaagtaagattataagaatttttattg

SEQ ID NO: 1054 - DNA, 100 bp, synthetic construct
  source 1..100: mol_type = other DNA
aacctactgcaattttattaaaagctgatcaatacttcaagtaaaactcgttgtaaacatagagattcagactttggtcctatatcaatcaatgcactcc

SEQ ID NO: 1055 - DNA, 100 bp, synthetic construct
  source 1..100: mol_type = other DNA
gtttaaaaacaatcttgaggtttgtttaggataatagcaattgttgtctaggagttaagcttggagaagaatggaaagatcttgaatgtcagaacacaaa

SEQ ID NO: 1056 - DNA, 100 bp, synthetic construct
  source 1..100: mol_type = other DNA
ggagaagtaggagcagaagaaggagaaggaaggaaagaagaagaacaaagctagaggtattaccctacctgatttcaaagcttataaactctcaggtgtg

SEQ ID NO: 1057 - DNA, 100 bp, synthetic construct
  source 1..100: mol_type = other DNA
gttaacaacaaaaaaaaaaagcaggagagcaaaataaagagaaaagtagaaatcaggcattcagaaaacaaacaaaaaaaaaccaatacaataagtaaat

SEQ ID NO: 1058 - DNA, 100 bp, synthetic construct
  source 1..100: mol_type = other DNA
ccccccaaaagtcaataaaaaaccaaaaacatgttactgctacagaagttatagaccatggaacacaatttgaggagcacagatttaggttacttaaagt

SEQ ID NO: 1059 - DNA, 100 bp, synthetic construct
  source 1..100: mol_type = other DNA
taaaaattatttaaaaataaataaataaataaattgcactccttatagaaaaacagcttactgtcgcctgtcccaagtgagtgagtttcagatgaatgag

SEQ ID NO: 1060 - DNA, 100 bp, synthetic construct
  source 1..100: mol_type = other DNA
gacatactccagataaaggcagacatcgctccatgttggccaatgtcaggactgcttatctctctctttttttattgttatactttaagttctgggatac

SEQ ID NO: 1061 - DNA, 100 bp, synthetic construct
  source 1..100: mol_type = other DNA
ataaaaataagtaaaaaagaataggttaataaattgtaatatatctataggtatgggatagcatttcttataaatgaagttttggaaaaagattttaaga

SEQ ID NO: 1062 - DNA, 100 bp, synthetic construct
  source 1..100: mol_type = other DNA
agaaaagaaagattggggagaaaagtacagtgtaaatatttctagaaaattcctgaaaatgaagataattttatttattgattttgatggtatgtttgat

SEQ ID NO: 1063 - DNA, 100 bp, synthetic construct
  source 1..100: mol_type = other DNA
aggggggtgtggggatgaagtatggtttgaatgccaccctctaatgaagcatttcccatcccctgacccaatgtgagctctcctttctctgaaaccccgt

SEQ ID NO: 1064 - DNA, 100 bp, synthetic construct
  source 1..100: mol_type = other DNA
cactctaattataaaaattttcatctaatgctcaagggcttggaaaagatcctaatggttattttatctccattaaaggcaattggatgtgcttgtgccc

SEQ ID NO: 1065 - DNA, 100 bp, synthetic construct
  source 1..100: mol_type = other DNA
aagaagtaaaaaaagaaggctgagcatggtggctcacacccgtaatcccagcacttcgggaggccaaggcagaaggatagcttgagcccaggagtttgag

SEQ ID NO: 1066 - DNA, 100 bp, synthetic construct
  source 1..100: mol_type = other DNA
aaaaaaaattgacctagtactcagatttatatagtgaaatcttaaattttgctatctcgcaaagtaaagtttgtcatgctttttcatattcctccaggta

SEQ ID NO: 1067 - DNA, 100 bp, synthetic construct
  source 1..100: mol_type = other DNA
agaaaaaataaagaaaaacgaaaactctcaaataaagttaatataacaaggattaaaatacctaagaaaaactgaatacaagtttttgaaaaaacaccac

SEQ ID NO: 1068 - DNA, 100 bp, synthetic construct
  source 1..100: mol_type = other DNA
cccacttcccaaccaccccccagcaaaaaaaaaaaaaaaaaaaaacaggaaaagaaaaaaaaagcatatccctagagaacactggcttttcatcattttt

SEQ ID NO: 1069 - DNA, 100 bp, synthetic construct
  source 1..100: mol_type = other DNA
ttaattttatatctgttatggtgatctgtgattagtaatccttgatggtaccattgatgaaagtcaaaattacaacaaatttagattaaagatatgaatc

SEQ ID NO: 1070 - DNA, 100 bp, synthetic construct
  source 1..100: mol_type = other DNA
agcactagattcttctagacacctccgccaaagcactttgcctgttctctgggcttgtaggggctgagaggaaggtggtgatagtgagctttccacaaag

SEQ ID NO: 1071 - DNA, 100 bp, synthetic construct
  source 1..100: mol_type = other DNA
ctcctatcaaaaaaaaaacccacaaaagacttgaactctagaatcaagttggctgattttctattctaggttagcacttctcgagtgggtaactttcatc

SEQ ID NO: 1072 - DNA, 100 bp, synthetic construct
  source 1..100: mol_type = other DNA
cgaattcaactgagtatccagtttcatacaaataataataacatcttctataaaatgtattcttgtgtattaacacatggggctctgtagtactccagct

SEQ ID NO: 1073 - DNA, 100 bp, synthetic construct
  source 1..100: mol_type = other DNA
caccaaaaaaaatttcattaagtttaaagagattgaaataactgtgttgtccaatgacgatgtaattaaattagaaataaataatacagtaaatttggaa

SEQ ID NO: 1074 - DNA, 100 bp, synthetic construct
  source 1..100: mol_type = other DNA
atatgtaaaatttttaaaaaattaattgctttatttgttgatattttgtcaactaattaaaggatagaagtatatttattattacagcagtaaaatatta

SEQ ID NO: 1075 - DNA, 100 bp, synthetic construct
  source 1..100: mol_type = other DNA
aaaaatagtttctttttttaaaggtatcttttcaatattttcaagaaatatgattttatcacttctatatgtaactactccagtaacaaattaagtgaaa

SEQ ID NO: 1076 - DNA, 100 bp, synthetic construct
  source 1..100: mol_type = other DNA
accacccctgccaaaaaaaattgatgagatgatatctctctctcctctgagatactataacttggtttgtatttagtaacatttattttttttgaagttt

SEQ ID NO: 1077 - DNA, 100 bp, synthetic construct
  source 1..100: mol_type = other DNA
acattaaaaaaaaaaatcctttatttttaactttgccttcaaaattaagttcagcatagattgttaaatataataatatccaaattaaatatatccaaca

SEQ ID NO: 1078 - DNA, 100 bp, synthetic construct
  source 1..100: mol_type = other DNA
ttggggtatagaatggttgcaacaaaaagtagatcaaggctgggtgtggtggttatgtctgtaatcccaacacttttggaagccaacgtggaaggatcgc

SEQ ID NO: 1079 - DNA, 100 bp, synthetic construct
  source 1..100: mol_type = other DNA
ctgaatttaaaaaataataataatacatttgtgtctttttgagcgactaatcttgtcatacttgttacagcagcaatagaaaactaatacagcagcagta

SEQ ID NO: 1080 - DNA, 100 bp, synthetic construct
  source 1..100: mol_type = other DNA
cccagccaatatacacacaaagacgatgcaactaatcctctcagaaagcaatctcaagtttatagaacaaatctctctctttacatgtattcttttcctt

SEQ ID NO: 1081 - DNA, 100 bp, synthetic construct
  source 1..100: mol_type = other DNA
taaagaagaaaaaaaagccagtgggactatttagaatctacttataatgtgtttcaaagcactgtgttttgaccatctttcagatcaagaaggataaaaa

SEQ ID NO: 1082 - DNA, 100 bp, synthetic construct
  source 1..100: mol_type = other DNA
aacacacacacacacacacacacacacacacaaacacacacacacacacacaaaagaacccctcttcgatcaacacatgtctgacataggtggagtcttt

SEQ ID NO: 1083 - DNA, 100 bp, synthetic construct
  source 1..100: mol_type = other DNA
atgcaaaaaaaaaaaaaattaggggtccaaatacaatgcctcaggtctgtaatcccagcattctggtaggccaaggtgagaggattgctccaggccaaga

SEQ ID NO: 1084 - DNA, 100 bp, synthetic construct
  source 1..100: mol_type = other DNA
caggatatttttatttttaatcctttaatttaaagtgctcagcatgccaaagtgccatactttgaagtatcactttctgagccccaatagaagtataata

SEQ ID NO: 1085 - DNA, 100 bp, synthetic construct
  source 1..100: mol_type = other DNA
tagtaaaacacacagatcttaaatatataattcaatggctttttacaaatatctatctgtagccaacaccccaatcaaggcagaaaacattgccaccatt

SEQ ID NO: 1086 - DNA, 100 bp, synthetic construct
  source 1..100: mol_type = other DNA
gaaataaaaaataaaaagagcatagtactcttacatgctgtctacaaaacaaacccattgtacctataaaggcaaaatatgctaaaagtgataaagaagg

SEQ ID NO: 1087 - DNA, 100 bp, synthetic construct
  source 1..100: mol_type = other DNA
tctgggggaaattttttttaaatgctagcaagagattacaagtgaaatatgattcatacctataaataactgctttagaaaggggccagtcttgttttta

SEQ ID NO: 1088 - DNA, 100 bp, synthetic construct
  source 1..100: mol_type = other DNA
cccccacaaagaataacattaataaaaaagtaagaaaatgtaacataaatagaaaagaactggcttatttacccaggtaactactcaatccacaatgaac

SEQ ID NO: 1089 - DNA, 100 bp, synthetic construct
  source 1..100: mol_type = other DNA
ctatgcaatctatgcaggtaacaaaactacacttgtaccttataaattcacacaaatgaaagaagacaacatgaataaaaaggaatgaaaagaaacaaaa

SEQ ID NO: 1090 - DNA, 100 bp, synthetic construct
  source 1..100: mol_type = other DNA
aaggccatcctgctgtgcagataggagatgagtgaggccggaggagtggcaggaggaggtgcctaggccggtcctcatagctttgtccagatagaaggaa

SEQ ID NO: 1091 - DNA, 100 bp, synthetic construct
  source 1..100: mol_type = other DNA
tatcactataaaatctgaataagaaagcaagtattagtaaaaatgggagaaaacttcctttgaaaaaaagttggtagctctaaagaaaacaaattttagt

SEQ ID NO: 1092 - DNA, 100 bp, synthetic construct
  source 1..100: mol_type = other DNA
aaaacattaataataaaactagttttctaaagaacagctactcgtttgctatctcttctagtagacgtagggagttcaaactgttttcaccattactgct

SEQ ID NO: 1093 - DNA, 100 bp, synthetic construct
  source 1..100: mol_type = other DNA
ctgctaccaaaaaaaaaagattgaaaatatgttcgaagaactaaagaaaattatgcacaaagaattaaaagaaaatatagaatgatgtttacaatgacaa

SEQ ID NO: 1094 - DNA, 100 bp, synthetic construct
  source 1..100: mol_type = other DNA
ccgattttttaaaaaagaagaaaatcatttctagaaagtatcaagataataaaatgatttggaaattttaaaaatataccagaaaaattagaatatgtaa

SEQ ID NO: 1095 - DNA, 100 bp, synthetic construct
  source 1..100: mol_type = other DNA
aaaaaaagttttcatatagatttggtagagattgttatacgttgtcccaaataaaactgtgtctttatgtttttaaataaaacatttcttagttagcgta

SEQ ID NO: 1096 - DNA, 100 bp, synthetic construct
  source 1..100: mol_type = other DNA
tatggagactgaatatttcagtaaaaaaaattatatatatatatatatatataaaataaataaataaaatactaattggattgtttgaaacacaaagaat

SEQ ID NO: 1097 - DNA, 100 bp, synthetic construct
  source 1..100: mol_type = other DNA
ccccacatgctataaactaaaaaaaagaggctgggcgtggtggcttatgcttgtaatcccagcactctgggaggctgaggtgggttgatcacttgaggtc

SEQ ID NO: 1098 - DNA, 100 bp, synthetic construct
  source 1..100: mol_type = other DNA
ccaagatttaaaaaaagacaaagaaagaggcaaacatagaatctagggaagcatgtctctaacaaaggagagtagcaaaagaagtgcctggctgaaaacc

SEQ ID NO: 1099 - DNA, 100 bp, synthetic construct
  source 1..100: mol_type = other DNA
ctgaacaaaaaaataaataaaaaataaaaataaaattggtttgatagggtcactcacacctgtaatcccagcacattggaatgtcaaggtgggagatcgc

SEQ ID NO: 1100 - DNA, 100 bp, synthetic construct
  source 1..100: mol_type = other DNA
ctgaacaaaagaaaataaataaataagaagaagaagatatggccaagagaaaatatattatattcagagcatattatgagagtcatttttctgggtacat

SEQ ID NO: 1101 - DNA, 100 bp, synthetic construct
  source 1..100: mol_type = other DNA
acacacacacaaacacacacacacacacacacacacacacacacacagagatagataatacagaagctgtgagaggagataaagattacttagtttacat

SEQ ID NO: 1102 - DNA, 100 bp, synthetic construct
  source 1..100: mol_type = other DNA
aggagtatcacttgcatccaggagttcaagaccagcctggacaacgtagtgagaccccatgtctacacaaaattaaaaaattaaccacgtgtggtagtgc

SEQ ID NO: 1103 - DNA, 100 bp, synthetic construct
  source 1..100: mol_type = other DNA
aaaagaaattaaaaagtaaaaacaaaaaaaaaagaaaagaagataaaacaaaagcaaataaaagaaaaaagaaaagttacctgaaatgaattgcagccta

SEQ ID NO: 1104 - DNA, 100 bp, synthetic construct
  source 1..100: mol_type = other DNA
ctgaagtttgttggaataaaaaagaaaaatggataaaaggtttttaaaacagaaaggggaaaaaaacaggcctaagagaggggtctcccccagatctcag

SEQ ID NO: 1105 - DNA, 100 bp, synthetic construct
  source 1..100: mol_type = other DNA
ctctcctctacacataaagaaatataagatataatttaaaatataacaaagaagagactatcaatttaaccagtgagtttgaaaaataacttaataaaat

SEQ ID NO: 1106 - DNA, 100 bp, synthetic construct
  source 1..100: mol_type = other DNA
atgaaaaacagctttcccatacacacacagttatttacatattactgtattaaaaagtacatacaggctgggcacggtggcttacgcctgtaatcccagc

SEQ ID NO: 1107 - DNA, 100 bp, synthetic construct
  source 1..100: mol_type = other DNA
taaaactagtacctcaattacccatgtatccatacacttgaaactatacccattaaacactaactccctggccgggcacggtggctcctgcctgtaatcc

SEQ ID NO: 1108 - DNA, 100 bp, synthetic construct
  source 1..100: mol_type = other DNA
aaaaaaaattaacatgttaaatttcaggaaaggtatctctctattagcccccacttattctttcatttattcattctgcatttatttagcattatcattt

SEQ ID NO: 1109 - DNA, 100 bp, synthetic construct
  source 1..100: mol_type = other DNA
cagtaaaaaacagaaagaaaaaattatcctaaaattggctgtggtaatggttgcgcatatgctgtgaataggcttccaaatattgaaatgtccacttcaa

SEQ ID NO: 1110 - DNA, 100 bp, synthetic construct
  source 1..100: mol_type = other DNA
tgtgcagataacaagagtagcttgattcataatcaccaaaaactagaaacaatctaaatgccctttgttgctgaatgaataaacaaactgtggtacattc

SEQ ID NO: 1111 - DNA, 100 bp, synthetic construct
  source 1..100: mol_type = other DNA
gtcttcatggttgaagaacaggtccaggccgggctcggcaggtcacgcctgtaatcccagcactttgggaggctgaagcaggtggatcacctgaggtcag

SEQ ID NO: 1112 - DNA, 100 bp, synthetic construct
  source 1..100: mol_type = other DNA
ctgaatataattttttaaaaaaataaataaaagtaaaaactacaaatcacattaaatgcaggtatcacttatatactccaattactctattgttctccaa

SEQ ID NO: 1113 - DNA, 100 bp, synthetic construct
  source 1..100: mol_type = other DNA
cccatgtggagagaggctgagaaacaatcaaaatacacattctaaaactcccaacgattagagattgttttttattactagttcagttttgatgatatga

SEQ ID NO: 1114 - DNA, 100 bp, synthetic construct
  source 1..100: mol_type = other DNA
aaggaaagaaagaaagaaagaaaaggaaaggaaaggaaaggaggaaggaaggaaggagaaagaaataaagaaagaaagaaagaaagaaagaaaaagaaaa

SEQ ID NO: 1115 - DNA, 100 bp, synthetic construct
  source 1..100: mol_type = other DNA
aggaattttaaaaaatacattattgacttacttttcttttaaacataacaaagtactgcataatattaaattagaccttttgatctgaaatgtaactatt

SEQ ID NO: 1116 - DNA, 100 bp, synthetic construct
  source 1..100: mol_type = other DNA
ttgaaaaaaataaaaaagaaagaaagagaggactaaataatgagagcacaccttagccattgtttgtctactttgactaagagcatagtagaaatgcatt

SEQ ID NO: 1117 - DNA, 100 bp, synthetic construct
  source 1..100: mol_type = other DNA
ccaaaaaaaaaaaaagcaggcctagaatatggaatatatcagtcaagataggccaagttatgcagcagaaacaattggaaataatagcagtgaagcacag

SEQ ID NO: 1118 - DNA, 100 bp, synthetic construct
  source 1..100: mol_type = other DNA
actccttgtctaaatcagaggttgcagctctggtcatgttatattagatgattccgcactctaaacctccgtagtagatcctgccccacctcagggctat

SEQ ID NO: 1119 - DNA, 100 bp, synthetic construct
  source 1..100: mol_type = other DNA
ctgaactttgttagtaaaaaaatatatattaaaaaacaacaacaacaacaacaaaaacaactcgggtgcggtggctctcgcctgtaatcccagcactttg

SEQ ID NO: 1120 - DNA, 100 bp, synthetic construct
  source 1..100: mol_type = other DNA
atgctattaaatttcactggaaagccccctatgctattaaatttctttaaatgaaaaataaaaaacaattgagtcaaataaattaagaaaaaatattcta

SEQ ID NO: 1121 - DNA, 100 bp, synthetic construct
  source 1..100: mol_type = other DNA
cttgcaataatcatttttaaatgctaaaagaatatacatttatggtaaaagaataaaattccattttaaaagctttcgtaaactaaataattttttgtaa

SEQ ID NO: 1122 - DNA, 100 bp, synthetic construct
  source 1..100: mol_type = other DNA
ttatatttaaacagaggaaactgggctacatgatttcttcattccctctaagaaagaaatgttttgcctacctcacttctcatattttggaaatgaacat

SEQ ID NO: 1123 - DNA, 100 bp, synthetic construct
  source 1..100: mol_type = other DNA
tttccttttcctaatcaccatgcttctgccagcaacttaccaactcaatgaatgcctcatccactgccacaacgccagacacccacattgcttctgatca

SEQ ID NO: 1124 - DNA, 100 bp, synthetic construct
  source 1..100: mol_type = other DNA
tggctgctgtattactctgtcacatgtcttgggagaggtccagtttctgtcaccctagcattaactgaaaagcgggatgaaatatgaagacattttgcag

SEQ ID NO: 1125 - DNA, 100 bp, synthetic construct
  source 1..100: mol_type = other DNA
agaaacaaatacaaataaatacaataggcaaaatacacttttatattatttaaagtttttaaaatggaaaaagaaaagcatttggccctttgagtatagc

SEQ ID NO: 1126 - DNA, 100 bp, synthetic construct
  source 1..100: mol_type = other DNA
aaatgagtgaataaatagagaatactccttatgttttaaaatcctcagatcaaagaagtgatctttctactgtgggcttcattcagcctccggacaggca

SEQ ID NO: 1127 - DNA, 100 bp, synthetic construct
  source 1..100: mol_type = other DNA
taagaaaaaatttttttcaattggtaatttaaaactgattaataccactatgcaactgagagagtgaaaatgtctgtttcctgtcaatttttcaactgaa

SEQ ID NO: 1128 - DNA, 100 bp, synthetic construct
  source 1..100: mol_type = other DNA
gagagacagagaacaaaagaaaagaaagaaagtaagaaaaaaagaaagaaagagagagagagaaagaaagaaggaaataaagaaagagagagaaagaaaa

SEQ ID NO: 1129 - DNA, 100 bp, synthetic construct
  source 1..100: mol_type = other DNA
gcatcctccctgagggattttttttttaagtatacaattcagtgattttttaaaagtatattcatgaagttatgcaaccattgtcactatctaattgcag

SEQ ID NO: 1130 - DNA, 100 bp, synthetic construct
  source 1..100: mol_type = other DNA
aggaaaaaaatctaggtacataaaccctgggaccttgctttctaaatttgccatctaacatctgattttgaccctcagggttgtagtgtgaaatgatttg

SEQ ID NO: 1131 - DNA, 100 bp, synthetic construct
  source 1..100: mol_type = other DNA
ttggggaataataacattttaaaaaattacttgtaaaaatattttttaaagatgttaattgaaatccctagggcaaccactaagaaaataacttagaaat

SEQ ID NO: 1132 - DNA, 100 bp, synthetic construct
  source 1..100: mol_type = other DNA
tttggttgccttgactcctgattcatgtctttacgttctcttcctcaacaagcttcttaataggtattttcttccaaaataggtttttttttttgttttt

SEQ ID NO: 1133 - DNA, 100 bp, synthetic construct
  source 1..100: mol_type = other DNA
aaaaaaaaaaaaaaaaaattagccaggcgtggtggtgtgtgcctgtaatcccagctacttgggaggctaagacaggagaatcacttgaacccaggaagca

SEQ ID NO: 1134 - DNA, 100 bp, synthetic construct
  source 1..100: mol_type = other DNA
aaccaccccgatgcgaatcaggatattgccagcatcccagaagcccagccccctgagcccctcccagccctgtcagtcactccgatcccagcccttctgg

SEQ ID NO: 1135 - DNA, 100 bp, synthetic construct
  source 1..100: mol_type = other DNA
gcctcccaggttcaagcaattctcttgcctcagcctctcaagctgggattacaggtgccagacacgttgcctgggtaatttttttgtatttttaatagag

SEQ ID NO: 1136 - DNA, 100 bp, synthetic construct
  source 1..100: mol_type = other DNA
tgagaaatttatattaaaaagaaaaagaaaaaataaaacatgcctgtgacaattaatgtagtcttctacacttgatcttagccaaaacctgagaagcaat

SEQ ID NO: 1137 - DNA, 100 bp, synthetic construct
  source 1..100: mol_type = other DNA
caaaaaaaagggaattgtatgaggtgatagatatgttaagtagtttgtggcaatcatttcacaatgtatacatatataaaaccatcaccttgtacacttt

SEQ ID NO: 1138 - DNA, 100 bp, synthetic construct
  source 1..100: mol_type = other DNA
gtggagggtcctgtccctggggagaccaagctggcaggtgctttttttcttcctcttggcctctcatcagcagccctgtttaaaccttcttggatggtct

SEQ ID NO: 1139 - DNA, 100 bp, synthetic construct
  source 1..100: mol_type = other DNA
tacaaaaatatgtaggtctatttcattttcactacaatatagtattccatttatgtaatttctttttttgacacagagtcttgctctgttgcccaggctg

SEQ ID NO: 1140 - DNA, 100 bp, synthetic construct
  source 1..100: mol_type = other DNA
ccggggatacaaaaaaaaaaaaaaaagaattaaaagaaatatcacctaaataatgcttttctgtgtatttactagtatattttcagaataccattaaata

SEQ ID NO: 1141 - DNA, 100 bp, synthetic construct
  source 1..100: mol_type = other DNA
acttgttgtgtaaattagacagttgtgactttttttttttttttgagacggagtcttgctctgtcaacaggctggagtgcagtggtgcgatctcagctca

SEQ ID NO: 1142 - DNA, 100 bp, synthetic construct
  source 1..100: mol_type = other DNA
gaataccatgcaggacataggcatgggcaaagacttcatgtctaagacaccaaaaacaatgacaacaaaagtcacaattgacaaatgggatctaattaaa

SEQ ID NO: 1143 - DNA, 100 bp, synthetic construct
  source 1..100: mol_type = other DNA
cattgagttaaaaatggaccttttttatttttaaaaagctaattaactagatttgcttacttaaaatcaaagcaatcaactcgttacaagtctagaaata

SEQ ID NO: 1144 - DNA, 100 bp, synthetic construct
  source 1..100: mol_type = other DNA
atagaaaacataaattaaaaatgtaaaaactaagtaatttatatgacataaagtgaaaagtacacaattctgtggtatttggcgcatgatgttgtcatgc

SEQ ID NO: 1145 - DNA, 100 bp, synthetic construct
  source 1..100: mol_type = other DNA
taataaaaattaaaaaataaaagttacacaagtgatttacaataagtttaatttaggaaatatcagtattttatgattcccagctgttatctcaaacatg

SEQ ID NO: 1146 - DNA, 100 bp, synthetic construct
  source 1..100: mol_type = other DNA
tatctttaaaaaagagcaaggtacgggccaggcgcagtggctcacgcctgtaatcccagcactttgggaggccgaggcgggcagatcacgaggtcagatc

SEQ ID NO: 1147 - DNA, 100 bp, synthetic construct
  source 1..100: mol_type = other DNA
cttcggggagagaacaaccgttgtttaatggaagatttcgatcagttagggtacaagctaaatagttatgttcttgttgtttgagttggattaggtgttt

SEQ ID NO: 1148 - DNA, 100 bp, synthetic construct
  source 1..100: mol_type = other DNA
ggcattaaaatcacttgaacccaggaggtggaggttgcagtgggctgagatcacgccaccacactccatcctggccaacagagcaggactctgtctccaa

SEQ ID NO: 1149 - DNA, 100 bp, synthetic construct
  source 1..100: mol_type = other DNA
ctcgcaaaaaatgaacctgtcaaaaataagaagtacaacaactttccaagatacagacaatataataagatataaatagaaaaagcaaaaaggtaaaaag

SEQ ID NO: 1150 - DNA, 100 bp, synthetic construct
  source 1..100: mol_type = other DNA
aaaaagtgtgggctaccttttatcactgacctttgcttgagtccctttctagacattattagatggcaacaaagaatggaaaagcacaaattaaactgat

SEQ ID NO: 1151 - DNA, 100 bp, synthetic construct
  source 1..100: mol_type = other DNA
cgcctcagcctcccgagtagctgggattacaggcgcctgccaccgcgcctggctaattttttttttgtatttttagtagagacgggggtttcaccatgtt

SEQ ID NO: 1152 - DNA, 100 bp, synthetic construct
  source 1..100: mol_type = other DNA
tggtctgtagttaaaaaaaaaaaaatcaatgtcacaaaggacaaggaaatatgcaacatgtaatcttagattagatcctggatgttattagaacaacagg

SEQ ID NO: 1153 - DNA, 100 bp, synthetic construct
  source 1..100: mol_type = other DNA
ctcccatgagaaaacaacctacaattgggaaaatacataacttagaaagaaagggaaagtctttagtgtgatagaaattcctcccatatctgtttcctgt

SEQ ID NO: 1154 - DNA, 100 bp, synthetic construct
  source 1..100: mol_type = other DNA
gttacaaaaaacaaaacaaaacaaaacaaaacaacaaacagaaaaaaaaagagagaaaagatgctagaggaagcagtgtgacagacagatcatgagatgc

SEQ ID NO: 1155 - DNA, 100 bp, synthetic construct
  source 1..100: mol_type = other DNA
ctgaatataatattgtgtatatatatattacatatagccttgtaataattaaagacatagtaaatacagcttctttaaacttctattctctcttctctct

SEQ ID NO: 1156 - DNA, 100 bp, synthetic construct
  source 1..100: mol_type = other DNA
gacttttaatccattttttggcattaatacttttttctgctgcaaatctgtttaatgatgctaatttgcttaaatcatggaattatttttacatttataa

SEQ ID NO: 1157 - DNA, 100 bp, synthetic construct
  source 1..100: mol_type = other DNA
agttttgctctgttgcccaggctggagtgcagtggtgcgatcttggctcactgcaacctctgcctcttgggttcaagccattcttctgtctcagcccccc

SEQ ID NO: 1158 - DNA, 100 bp, synthetic construct
  source 1..100: mol_type = other DNA
acccccacccccaccaaaaaaaaaaaaaaaaaaaaaagatagttacaaatgtttcccagaatagttgtcccaatcgaatctattttctcatgtgtagtgt

SEQ ID NO: 1159 - DNA, 100 bp, synthetic construct
  source 1..100: mol_type = other DNA
ctgaacaaaaacaaaacaaaacaaaacaaaaaaacaaagtcacatattagggaaaagggggactctcaggagattagtgccacccttaaaggaagcagga

SEQ ID NO: 1160 - DNA, 100 bp, synthetic construct
  source 1..100: mol_type = other DNA
aaaaagaaaaaagaaaaaaatataaatatatatatattttacctatatgttactagaatatatattttatataatatatattttaaaatatatctttata

SEQ ID NO: 1161 - DNA, 100 bp, synthetic construct
  source 1..100: mol_type = other DNA
agtaaaaaacaaaaaagaaaggaaaggaaaaaaaaaagaaaagcccagaccagatagcttcatgggtgaattctaccaagcatttaaaactgaagagaaa

SEQ ID NO: 1162 - DNA, 100 bp, synthetic construct
  source 1..100: mol_type = other DNA
tgaataaagtaaaaaaagaaagaaatatagtgaatttttagcatgcaactattgtacatgatgagggtccattgagtctaagggagaccctacgagtgag

SEQ ID NO: 1163 - DNA, 100 bp, synthetic construct
  source 1..100: mol_type = other DNA
taataaatacacacttttatacagtttcattggtttggaggactttatgatgacaagcaaattcaaaatcattacactgaagactcacagagccaagtag

SEQ ID NO: 1164 - DNA, 100 bp, synthetic construct
  source 1..100: mol_type = other DNA
catgggaaaaaaaaatagcgaggaatcatattttcccagacaatttcttatgagagccagataagattatgcatatcagctcatggtaaaaggcagtaaa

SEQ ID NO: 1165 - DNA, 100 bp, synthetic construct
  source 1..100: mol_type = other DNA
ctggaacaacaacatacacattataaagcttattgtgctatttctttagctattatttctgtttctgtgaaacttttaaaatattctaaaataatctagg

SEQ ID NO: 1166 - DNA, 100 bp, synthetic construct
  source 1..100: mol_type = other DNA
aactgaaaaaaaaacaacaacaaaaaacgaaggcaataaggaaataaggggaggaactgaagaacagaaaaaggagcagagataacatcctttaaattaa

SEQ ID NO: 1167 - DNA, 100 bp, synthetic construct
  source 1..100: mol_type = other DNA
agaaaagaaaacaacaggtacaaatatatggatgtgggaagcagcactgtgtgtttaacgaactacaattggttatgtattgctagggtacaaagtgcta

SEQ ID NO: 1168 - DNA, 100 bp, synthetic construct
  source 1..100: mol_type = other DNA
ctaaactttgttggtaaataaaagttgaaaaaaaaatgactaggtgcagcggctcacatgtctaatcccagcgctttgggaggccgaggtgggagaatca

SEQ ID NO: 1169 - DNA, 100 bp, synthetic construct
  source 1..100: mol_type = other DNA
atgcagaagtagtaaatactgattcatgtaaaataataaacaactttatctttcagtttttaaaagacagggtcttgtaacgttgcccagactggccttt

SEQ ID NO: 1170 - DNA, 100 bp, synthetic construct
  source 1..100: mol_type = other DNA
ctgaatttttaaaagtctaaagaaaagggttttaggaagttgtattatagcaggttgtgtcttatgtttggtttgataagttatgagctgttcctatgat

SEQ ID NO: 1171 - DNA, 100 bp, synthetic construct
  source 1..100: mol_type = other DNA
ctgaattttcttgcagttgaacaacagaggctttttttgtgtgtgtgggggtgcttggttttgggaggttgaagagtacttgttcgcaaactctctaaat

SEQ ID NO: 1172 - DNA, 100 bp, synthetic construct
  source 1..100: mol_type = other DNA
gtggaaaacctcttttccatgaaaataaaaagggatatagagcaaatgcagttctcaattcctggtactgggaatgtgaagtcatttcgccactttggaa

SEQ ID NO: 1173 - DNA, 100 bp, synthetic construct
  source 1..100: mol_type = other DNA
ctgaaaagaaagagagagataaaataggtggggtgcagtgactcacacctgtaatctcaacagtctggtcggctgaggcaggaggattgcttgagcttat

SEQ ID NO: 1174 - DNA, 100 bp, synthetic construct
  source 1..100: mol_type = other DNA
tagtaaaaaaaagaaaagaatctataatcaaacaagaccaagaaacactaggctaaatgaagttaaaaggtcactttgtagtagaaatcattgcaacctt

SEQ ID NO: 1175 - DNA, 100 bp, synthetic construct
  source 1..100: mol_type = other DNA
tgggtgttaaaacacggtgttactggccgggcacggtggatcccacctgtaatcccagcactttgggagtctgaggcaggtggatcacaaggtcaggagt

SEQ ID NO: 1176 - DNA, 100 bp, synthetic construct
  source 1..100: mol_type = other DNA
aaaaaaaaggattaaatcatgattaaaacaagtgtgaagaggagagataacaatttgggggttgtttttcctttattgtctacttgaattcttggataat

SEQ ID NO: 1177 - DNA, 100 bp, synthetic construct
  source 1..100: mol_type = other DNA
gatgtcagttttttttttttctaaaagcaaacaaaaacaattggcttcagacattttgaacaaaacaagcagaagctgttttctttaagaaattacaagc

SEQ ID NO: 1178 - DNA, 100 bp, synthetic construct
  source 1..100: mol_type = other DNA
gtgtttaaaattaaaaaaaaaaaaactttattaaaggcacagaacattaataaaaattgacaataaactgggctattaagtaaattgcaacaatttccag

SEQ ID NO: 1179 - DNA, 100 bp, synthetic construct
  source 1..100: mol_type = other DNA
cttcccctccaaaaaaaaaaaaaaagaaaaagttgaagaattaagagaaataacacgtgtaaaataattttaaataaaatgaaaagagtagtaaaagtat

SEQ ID NO: 1180 - DNA, 100 bp, synthetic construct
  source 1..100: mol_type = other DNA
ccttgaaaaaaaatttttttttttttgagacagagtctcactctgtcgcccaggctggagtgcagtggtgccatctctgctcactgcaagctccacctcc

SEQ ID NO: 1181 - DNA, 100 bp, synthetic construct
  source 1..100: mol_type = other DNA
ataaacataaaaaacagaagtactttccagagactaggattacagacaacctggatataaactaagttctggaggtattttaaaaagagtattctaaaga

SEQ ID NO: 1182 - DNA, 100 bp, synthetic construct
  source 1..100: mol_type = other DNA
agttttaaatccacaaccaccccaccccaaaacaatgattagcacaatgagaaactttacctgaggttggttacaccccagatcctttcttttacacaaa

SEQ ID NO: 1183 - DNA, 100 bp, synthetic construct
  source 1..100: mol_type = other DNA
gggaaaaaaaaaaaacaaaaaaacttatatggagtttaaaatataattaattaaaaatcaatcctgtgggatcacatatctaggggagactttaacccat

SEQ ID NO: 1184 - DNA, 100 bp, synthetic construct
  source 1..100: mol_type = other DNA
gtgaactgtaaaaaaaaagaaaaagaaaagaaagacaccattgttttggatttcaagttcactctaaacccaggatgacttattgtgagatccttagtga

SEQ ID NO: 1185 - DNA, 100 bp, synthetic construct
  source 1..100: mol_type = other DNA
ctcccctgacataaatggttttttttttccttttttgagaggagtctcgctctgtcacccaggctggagtgcagtggcaccaactcggctcactgcaaac

SEQ ID NO: 1186 - DNA, 100 bp, synthetic construct
  source 1..100: mol_type = other DNA
ccacggggggacagaaaataatagattatagtgatccttctctttctgttcatcaccatagcaattcatttctttgattaatcttaggtatgtaccatgt

SEQ ID NO: 1187 - DNA, 100 bp, synthetic construct
  source 1..100: mol_type = other DNA
gatatggtttggctctgtgtccccacccaaatttcatcttgaattgtaatccccatgtgtcaagggagggatctggtgggaggtgactggatcatggggg

SEQ ID NO: 1188 - DNA, 100 bp, synthetic construct
  source 1..100: mol_type = other DNA
cccagccaaaagtaaaagaaaaaaaaagctgcaatagttctttatatagtttagatacaaggcccttatcagatatttgattttcaaatattgtctccca

SEQ ID NO: 1189 - DNA, 100 bp, synthetic construct
  source 1..100: mol_type = other DNA
accctcaaaaaaattaaaaaaataaaataaagaagggagaactgaacaccagatgggccaaggctaaaaatttctgccctgggagttccagaccattctg

SEQ ID NO: 1190 - DNA, 100 bp, synthetic construct
  source 1..100: mol_type = other DNA
tttcccctgggggagaaaaaagaaaggggaaccctcatggtgcccacatgcctgtcagggggaagtctgctcgggtcatcaactatgaggagttcaagaa

SEQ ID NO: 1191 - DNA, 100 bp, synthetic construct
  source 1..100: mol_type = other DNA
cctgactagctctagtctactccttgttgactagttttaactagcaggaaaataaacatcaagagaaaccaagtccttactgtcagagctccacacagag

SEQ ID NO: 1192 - DNA, 100 bp, synthetic construct
  source 1..100: mol_type = other DNA
ctcacccactgccacccaaaaggtgtatgtgtgatcaatgaaaagtaagaatcaatggtaatacttttctgtttgaaaacactggagaaattatcagatg

SEQ ID NO: 1193 - DNA, 100 bp, synthetic construct
  source 1..100: mol_type = other DNA
aaaaacaaaaaaataaacaagtttctcccctcgttctatggttttatagccccagcagtattatttcccaatccttctaaaaaagaaaccatagcaacaa

SEQ ID NO: 1194 - DNA, 100 bp, synthetic construct
  source 1..100: mol_type = other DNA
tctccccagcaatacaaataaataagtaggctgggcacagtggcccatgcctgtaagcactttgggaggccagggcagtaagattgcttgaggccaggag

SEQ ID NO: 1195 - DNA, 100 bp, synthetic construct
  source 1..100: mol_type = other DNA
atccctcctcgaaaaataaaaaatgaaaaaatggttttataaagcaagtaagtcatattctaaacaactatgttcacaggttagctcattaaagtcagtg

SEQ ID NO: 1196 - DNA, 100 bp, synthetic construct
  source 1..100: mol_type = other DNA
caaaaaaattttttttaaatagtccgggcatagtggctgacacttgtaatcccaacagctggggaggccaaggccggaggattgcttgaacccaggaatt

SEQ ID NO: 1197 - DNA, 100 bp, synthetic construct
  source 1..100: mol_type = other DNA
ccggggatacaacgtgtttcctaaaagtagagggaggtaagagacggtagcacctgcggggcggcttgcacgccgagtgcctgtgacgcgccggcttaac

SEQ ID NO: 1198 - DNA, 100 bp, synthetic construct
  source 1..100: mol_type = other DNA
ccggggatacaacgtgtttcctaaaagtagagggaggtaagagacggtagcacctgcggggcggcttgcacgccgagtgcctgtgacgcgccggcttgac

SEQ ID NO: 1199 - DNA, 100 bp, synthetic construct
  source 1..100: mol_type = other DNA
cctgggatacaacctgtttgcaaggttagaaagaaaagactgcgccgggtagtttaggatagttggtaggttttcttactcctttaagtatcataaggtt

SEQ ID NO: 1200 - DNA, 100 bp, synthetic construct
  source 1..100: mol_type = other DNA
cacccacccaccctcccaaaaaaaaggaaaaaaaaaaagtcaagtgggttgttttttcagagatgctaccaaaaatgtaaaaaggtagaatagcccccag

SEQ ID NO: 1201 - DNA, 100 bp, synthetic construct
  source 1..100: mol_type = other DNA
aaattaaaaataaaaaaaaaaaaaataggctgggctcacgcctataatcctaccactttgggaggccaaggcgggcggactgcctgagctcaggagttca

SEQ ID NO: 1202 - DNA, 100 bp, synthetic construct
  source 1..100: mol_type = other DNA
tttacaaaaaagataaacttgttatatgcaggagacaggaaattggaggagggacccaagaaggccatgtcctggagaatacagctttcctgggggcctt

SEQ ID NO: 1203 - DNA, 100 bp, synthetic construct
  source 1..100: mol_type = other DNA
gttgtggtagttgaaatgcaagttttgttagttgtgtattagcttttgctttttttttttttttttttttttttttttgccgtggaaggtttgtttcact

SEQ ID NO: 1204 - DNA, 100 bp, synthetic construct
  source 1..100: mol_type = other DNA
tgttattctttgtcaaatgggaagtagccaatgtgattgtctgtggccgtgtttggcttctccttgcttgtttcttgtgaactgtgtctttaaatttcca

SEQ ID NO: 1205 - DNA, 100 bp, synthetic construct
  source 1..100: mol_type = other DNA
gatctggcttgtttataaaaggcgtacgttgtatctttgcttcgtaggttttcctgtgttatattgtaacctcctgttttggaatagcgagagattgatg

SEQ ID NO: 1206 - DNA, 100 bp, synthetic construct
  source 1..100: mol_type = other DNA
ctgggctcaagcaatcctcccacctcagtccgccaagtgcctggaactataggcacacaccaccacacccagctaatttttgtatttttagtggagatgg

SEQ ID NO: 1207 - DNA, 100 bp, synthetic construct
  source 1..100: mol_type = other DNA
ctgaacaaaaaaaagaaaaaaataacatttacaaagaattttaatgacacagattatacatataatgtacatattatatataatatatatcttacatata

SEQ ID NO: 1208 - DNA, 100 bp, synthetic construct
  source 1..100: mol_type = other DNA
tcccaaaaaaaaaaaaaaaaaaaaggtagtcctgtcctcaggagaatcctcatagtactataaatcagaaagtattatttccactttaacagataaggaa

SEQ ID NO: 1209 - DNA, 100 bp, synthetic construct
  source 1..100: mol_type = other DNA
attaaaaaaggaacaaagtatttaattacctcatagttctataagaaattaggtatcattaaatattatataatattcatagctgtttttatccttttgt

SEQ ID NO: 1210 - DNA, 100 bp, synthetic construct
  source 1..100: mol_type = other DNA
tttccatttttttttttttttttttgagacggagtctcgctctgtcacccaggctggagtgcagtggcatgacctcggctctctacaacctctgcctcct

SEQ ID NO: 1211 - DNA, 100 bp, synthetic construct
  source 1..100: mol_type = other DNA
tcattttttgtcctaagagatcatagtgtgaagtttatattattaaaaacaaataaataataagaaaatagaggcatgtagctttacatgagttcatgtc

SEQ ID NO: 1212 - DNA, 100 bp, synthetic construct
  source 1..100: mol_type = other DNA
aaatgaaaagtttaaaaaaaaataaaagaattaattgctctttcctctgatcagagcgcttcactcatcccactggtgtgcactctctgcatgatattat

SEQ ID NO: 1213 - DNA, 100 bp, synthetic construct
  source 1..100: mol_type = other DNA
aaaccaaaaccaaaaccatgtcatgcctcttagctgagctaaggaaatgcattatatgactgtgtccataaacgtgtctcttggccaagaagcttccttc

SEQ ID NO: 1214 - DNA, 100 bp, synthetic construct
  source 1..100: mol_type = other DNA
catcgattttttaaaaatctgctttcattatttgcagcaaggcaagaatcttctattcagagcagatgtacaatcatggagagaatcctctgcatggcgg

SEQ ID NO: 1215 - DNA, 100 bp, synthetic construct
  source 1..100: mol_type = other DNA
atgtttattaaaaagaaaaaatttttgattcaaagtaaataaagtaaaatgcacaaaggaacagcccatacctcacccacacatggacaaaataaaaggc

SEQ ID NO: 1216 - DNA, 100 bp, synthetic construct
  source 1..100: mol_type = other DNA
aatatagtaaagatgtcaattctcccccaaactgatatgcaggtttaatgcaattcctatcaaaatcccagcaagttgttttacagaaacacacaacatt

SEQ ID NO: 1217 - DNA, 100 bp, synthetic construct
  source 1..100: mol_type = other DNA
cacgcaaaaaatattttaaaacaggagccaagcagtggctcatgtccataatctcagtactttgggaggccgaagcgggaggatcacgaggtcaggagat

SEQ ID NO: 1218 - DNA, 100 bp, synthetic construct
  source 1..100: mol_type = other DNA
actcccaacaaaaaagaaatggccattcagttgactcttgaacaacgagggaggggctggggtgccaccacctgcacagtccaaaatctgaattaacttt

SEQ ID NO: 1219 - DNA, 100 bp, synthetic construct
  source 1..100: mol_type = other DNA
gggggatatttaaaaaaaaagatttcaatctagaggctacaggctgcagatgctgggggtgatcacatgagagagctctgctgcagggaacgatatgtga

SEQ ID NO: 1220 - DNA, 100 bp, synthetic construct
  source 1..100: mol_type = other DNA
ctgtgcccagctcgtggcctgttctttgtacttgcggggaaggggtccccttctcccacagccatccccccggggcctgctcccaggtggggtctggttt

SEQ ID NO: 1221 - DNA, 100 bp, synthetic construct
  source 1..100: mol_type = other DNA
ctgtgcccagctcgtggcctgttctttgcacttggtgggggggttcctatctcccacagcttttccccccggggcctgctcccaggtggggtcaggtttt

SEQ ID NO: 1222 - DNA, 100 bp, synthetic construct
  source 1..100: mol_type = other DNA
ttaagaaaactaaaaaaaaacaaaacaaacaaaaaaaaaaactaaaaaaaaaaaccctacatctttctttctttttttttgagacagggtctcactctgt

SEQ ID NO: 1223 - DNA, 100 bp, synthetic construct
  source 1..100: mol_type = other DNA
aaggaaaacctctttttcatgaaataaaatgaaataaaacaattaaaaaataatagagagatcagaacttcccactagagccattagattcaaagctaat

SEQ ID NO: 1224 - DNA, 100 bp, synthetic construct
  source 1..100: mol_type = other DNA
ctcaaaacagagatgaactccctacttaaaaatgaggatatgtgtgcttttaatgtcatgcagaatcatacagatttccatttcattggacccttagagg

SEQ ID NO: 1225 - DNA, 100 bp, synthetic construct
  source 1..100: mol_type = other DNA
taatgctatcactccccttaacccccactccctgacaggccccagtgtgtgatgttccccttcctgtgtccatgtgttctcattgttcaactcccactta

SEQ ID NO: 1226 - DNA, 100 bp, synthetic construct
  source 1..100: mol_type = other DNA
cattgagttaaaaatggacgtttttttaaaaaaagctaattaactagatttgcttacttaaaatcaaagcaatcaactcgttacaagtctagaaataagg

SEQ ID NO: 1227 - DNA, 100 bp, synthetic construct
  source 1..100: mol_type = other DNA
ccccaccagcccccgtccccaccccccaaaaaaacagaaccccacatcacaaacacccccaagccctggcccaggtctttcggataaagggggccactgc

SEQ ID NO: 1228 - DNA, 100 bp, synthetic construct
  source 1..100: mol_type = other DNA
caagtaaataataataaataaataaataaataaataaataaataaataatgattagattaaactccagatctttctgactctgaaaccaactttctccta

SEQ ID NO: 1229 - DNA, 100 bp, synthetic construct
  source 1..100: mol_type = other DNA
gagccattccagagatccaggaagcaggaatcaacggacttgcacctccaggtgtttcaccagcatgaatctatagaactcatattccaagaagggtgtt

SEQ ID NO: 1230 - DNA, 100 bp, synthetic construct
  source 1..100: mol_type = other DNA
tctccccctaaatcaggctatcaaaatttgcaatgaacaaataggacccagcttatattacaaatctttgctgtgatgagctgaaacaggaatattctac

SEQ ID NO: 1231 - DNA, 100 bp, synthetic construct
  source 1..100: mol_type = other DNA
aaaaaaaaaaaaaagaaatggattattgaaagggaatggagatgaagaagttagaataggttatgtcaaggatccatgaggtttgggtgttatatcatca

SEQ ID NO: 1232 - DNA, 100 bp, synthetic construct
  source 1..100: mol_type = other DNA
ccaataagaaaaaaaaattaaaagaaaagaaatcacaaataaagttataaaatactccaagatgaatgaaaacaaaaacaaaacatgccaaaacttatgg

SEQ ID NO: 1233 - DNA, 100 bp, synthetic construct
  source 1..100: mol_type = other DNA
taaaataaaaacaaagaagtcaacgtaatacaaagcagaaaaacaataaagaaaatcaatgaaccccaaatctggttctttcagaagagcgataaagttt

SEQ ID NO: 1234 - DNA, 100 bp, synthetic construct
  source 1..100: mol_type = other DNA
acataaaaaggaaaaagaaaaaaaggaaaaagtaataaattagtatgaattgagcattttaatgattctattttattgcctttgttggcttattaaatat

SEQ ID NO: 1235 - DNA, 100 bp, synthetic construct
  source 1..100: mol_type = other DNA
aataaattttaaataaaaaaataaaaaaaaagaaacctggaacaaagactgattctgctctatgaagcctgttctatgaaggttcaacctgctcacctgc

SEQ ID NO: 1236 - DNA, 100 bp, synthetic construct
  source 1..100: mol_type = other DNA
aggggaaaaagaaaaaggaaatagacgagcacatttgacatttctcagtggcgtggcagatctctagggctttatctccttgtctcattcagagtgtgcc

SEQ ID NO: 1237 - DNA, 100 bp, synthetic construct
  source 1..100: mol_type = other DNA
ctaaactaaaaatagaaatgaagaaaaaagaaatggaagttcataatttaaaatttttatttttttgtacaaattgatggggtataagtgaaattttgtt

SEQ ID NO: 1238 - DNA, 100 bp, synthetic construct
  source 1..100: mol_type = other DNA
tgaacttcaaggatcgatttaacacttgtatttgtgggcttgttacttatgataacaggtggcctagtttcatggctttgtgtttaccgttttcgggtgc

SEQ ID NO: 1239 - DNA, 100 bp, synthetic construct
  source 1..100: mol_type = other DNA
tttctgacgatcacttacatttgtgttatgctgattagcagatatccacaaacatagctatgaagttctgactgggataaccttgctgtttgtctatttt

SEQ ID NO: 1240 - DNA, 100 bp, synthetic construct; identical to SEQ ID NO: 955
  source 1..100: mol_type = other DNA

SEQ ID NO: 1241 - DNA, 411 bp, synthetic construct
  source 1..411: mol_type = other DNA
taaggaccagcttctttgggagagaacagacgcaggggcgggagggaaaaagggagaggcagacgtcacttcctcttggcgactctggcagcagattggtcggttgagtggcagaaaggcagacggggactgggcaaggcactgtcggtgacatcacggacagggcgacttctatgcaaatcaagagaaatgcaaatgaggcagcgcagaggctgctgcttcgccacttgctgcttcgccacgaagggagttcccgtgccctgggagcgggttcaggaccgctgatcggaagtgagaatcccagctgtgtgtcagggctggaaagggctcgggagtgcgcggggcaaaagtcaccatgagtgtaaagggtgaggcgtatgaggctgtgtcggggcagagcccgaagatctc

SEQ ID NO: 1242 - DNA, 46 bp, synthetic construct
  source 1..46: mol_type = other DNA
cccaatttcactggtttcaaaaacagaaaaacagttctcttccccg

SEQ ID NO: 1243 - DNA, 107 bp, Mus musculus
  source 1..107: mol_type = genomic DNA
cccaatttcactggtctacaatgaaagcaaaacagttctcttccccgctccccggtgtgtgagaggggctttgatccttctctggtttcctaggaaacgcgtatgtg

SEQ ID NO: 1244 - DNA, 82 bp, synthetic construct
  source 1..82: mol_type = other DNA
cccaatttcactggtctacaatgaaagcaaaacagttctcttccccgctccccggtgtgtgagaggggctttgatccttctc

SEQ ID NO: 1245 - DNA, 57 bp, synthetic construct
  source 1..57: mol_type = other DNA
cccaatttcactggtctacaatgaaagcaaaacagttctcttccccgctccccggtg

SEQ ID NO: 1246 - DNA, 47 bp, synthetic construct
  source 1..47: mol_type = other DNA
cccaatttcactggtctacaatgaaagcaaaacagttctcttccccg

SEQ ID NO: 1247 - skipped

SEQ ID NO: 1248 - DNA, 156 bp, synthetic construct
  source 1..156: mol_type = other DNA
taacaacataggagctgtgattggctgttttcagccaatcagcactgactcatttgcatagcctttacaagcggtcatggaaatggcaccttgatctcaccctcatcgaaagtggagttgatgtccttccctggctcgctacagacgcacttccgc

SEQ ID NO: 1249 - DNA, 174 bp, synthetic construct
  source 1..174: mol_type = other DNA
taacaacataggagctgtgattggctgttttcagccaatcagcactgactcatgcaaatcaagagaaatgcaaatagcctttacaagcggtcatggaaatggcaccttgataagtcaccatgagtgtaaagggagttgatgtccttccctggctcgctacagacgcacttccgc

SEQ ID NO: 1250 - DNA, 282 bp, synthetic construct
  source 1..282: mol_type = other DNA
tcgccccctaacggtgacataaggcactctgtgaaatgctctgttccggaatcaaaagattgatccgattatttgcatacccataatgcactgctcacagtacaaatttaaaaaggcaaaatcaaacatttttattctaagcatattctgtgaaagttagacttttgtttaaacaatactcttaaaatttttttctaggtatagaaccttggcattcactagtcaccatcactatactaggagtttctgttacccgagaaacgagttatgaaattaacaagc

SEQ ID NO: 1251 - DNA, 300 bp, synthetic construct
  source 1..300: mol_type = other DNA
gtggcctcaggcgcagcgctaaaacgcatgaaccatttaaggtatttcctgaaactggagcgtgattggtgagactttatttgcatacccacaatgcattgcgcactaaataatgttcgtctttaaaattatttcccctttttccttcaacatatctttctcggaaccgagattgctgtcccagaattgtctgaagaaaaaggctgaagtcaatagctcttttgggccgaaggaaagttaccattacccgtttaggagtagccgttacctgagaactgtagtgtcgacgactgatgttat

SEQ ID NO: 1252 - DNA, 316 bp, synthetic construct
  source 1..316: mol_type = other DNA
gtggcctcaggcgcagcgctaaaacgcatgaaccatttaaggtatttcctgaaactggagcgtgattggtgagactttatgcaaatcaagagaaatgcaaatacccacaatgcattgcgcactaaataatgttcgtctttaaaattatttcccctttttccttcaacatatctttctcggaaccgagattgctgtcccagaattgtctgaagaaaaaggctgaagtcaatagctcttttgggccgaaggaaagtcaccatgagtgtaaagggagtagccgttacctgagaactgtagtgtcgacgactgatgttat

SEQ ID NO: 1253 - DNA, 316 bp, synthetic construct
  source 1..316: mol_type = other DNA
gtcaagtgcctctctccatttactggtaagagagagagggtttagaggaactcttgttccggcgctcagctcatgcaaatcaagagaaatgcaaatcccagaatgcattgtagatacgagaattattaccagggttatctgtttgaataataatatttaaactttttttctttgtcaggagattttacccagtgagaacatgtttaggacacttttctacagtggaagaaaagcttctgtctgcaggtccattctcgccatcagttaaaagttaccagtcaatagctgggaagccaggcaaaaggctaacaggcag

SEQ ID NO: 1254 - DNA, 95 bp, synthetic construct
  source 1..95: mol_type = other DNA
tataaagctgttaaaaaatcagattgacttcatttagggtgtttcttacagatatcgtttaagttttcggttctgcttgtaaacgcttcaatcgc

SEQ ID NO: 1255 - DNA, 100 bp, synthetic construct
  source 1..100: mol_type = other DNA
attttaagtgttttaaaaacagatgcgattccgttaaatcgcgtgtggagctatgtaaagtgtattatagaacaaatgcgagttacggtttttcagcttt

SEQ ID NO: 1256 - DNA, 100 bp, synthetic construct
  source 1..100: mol_type = other DNA
attttaagtgtttcaaaaacagatgcgattccgttaaatcgcgtgtggagctatgtaaagtgtattatagaacaaatgcgagttacggtttttcagcttt

SEQ ID NO: 1257 - DNA, 100 bp, synthetic construct
  source 1..100: mol_type = other DNA
gaatgttctgttgccaatgatagacgtgtgggtggggtgtttcatgctttgggaggttggggtagctccacaaatgtcacccaggttgtagcggagtggt

SEQ ID NO: 1258 - DNA, 206 bp, synthetic construct
  source 1..206: mol_type = other DNA
taacaacataggagctgtgattggctgttttcagccaatcagcactgactcatttgcatagcctttacaagcggtcacaaactcaagaaacgagcggttttatgattcacatatcagtggaggggtgtggaaatggcaccttgatctcaccctcatcgaaagtggagttgatgtccttccctggctcgctacagacgcacttccgc

SEQ ID NO: 1259 - DNA, 181 bp, synthetic construct
  source 1..181: mol_type = other DNA
taacaacataggagctgtgattggctgttttcagccaatcagcactgactcatttgcatagcctttacaagcggtcacaaactcaagaaaagtggaggggtgtggaaatggcaccttgatctcaccctcatcgaaagtggagttgatgtccttccctggctcgctacagacgcacttccgc

SEQ ID NO: 1260 - DNA, 130 bp, synthetic construct
  source 1..130: mol_type = other DNA
taacaacataggagctgtgattggctgttttcagccaatcagcactgactcatttgcatagcctttgatctcaccctcatcgaaagtggagttgatgtccttccctggctcgctacagacgcacttccgc

SEQ ID NO: 1261 - DNA, 121 bp, synthetic construct
  source 1..121: mol_type = other DNA
taacaacataggagctgtgattggctgttttcagccaatcagcactgactcatttgcatactcaccctcatcgaaagtggagttgatgtccttccctggctcgctacagacgcacttccgc

SEQ ID NO: 1262 - DNA, 400 bp, synthetic construct
  source 1..400: mol_type = other DNA
atttaatagcagtctttatttaaaagaaatcaaactcagacgtacaaatacacaaaacagataaaacccgagtctctgaccaggaaagcgttattttccagccagccagtcttcggcttcgccccctaacggtgacataaggcactctgtgaaatgctctgttccggaatcaaaagattgatccgattatttgcatacccataatgcactgctcacagtacaaatttaaaaaggcaaaatcaaacatttttattctaagcatattctgtgaaagttagacttttgtttaaacaatactcttaaaatttttttctaggtatagaaccttggcattcactagtcaccatcactatactaggagtttctgttacccgagaaacgagttatgaaattaacaagc

SEQ ID NO: 1263 - DNA, 400 bp, synthetic construct
  source 1..400: mol_type = other DNA
caattacttttgcaccgatctaatagctcgcccactgtaagtaaagcaggtaaagtcagcctttttcttctgggaccagactctgctctgccccgcggtggtggcctcaggcgcagcgctaaaacgcatgaaccatttaaggtatttcctgaaactggagcgtgattggtgagactttatttgcatacccacaatgcattgcgcactaaataatgttcgtctttaaaattatttcccctttttccttcaacatatctttctcggaaccgagattgctgtcccagaattgtctgaagaaaaaggctgaagtcaatagctcttttgggccgaaggaaagttaccattacccgtttaggagtagccgttacctgagaactgtagtgtcgacgactgatgttat

SEQ ID NO: 1264 - DNA, 200 bp, synthetic construct
  source 1..200: mol_type = other DNA
aatttttgtaatgaaaaaatagacggcaagggttattcttaaaactgcagttttgtagcttgggtggcatgttaagtgttctccttacagtcgcaacgatgggaaacagaaagtaacgtgttatcctctccgccgccgtgagctcttttaacactagctaagtggccgcagggctcttctctttcctttccacttggggc

SEQ ID NO: 1265 - DNA, 200 bp, synthetic construct
  source 1..200: mol_type = other DNA
atcatgttttataaaaaaagacttaaagaggaaaacattatggtgcaactttaggcttaagtgattcattgtcactgtttgtttaaacattgtgtaacagaacttgcaaagacagttaactcttgttttccatgtcaaaggtctgaatacttgcatgataaaagtctgtgtaactttccctggtgacatctgacttgcta

SEQ ID NO: 1266 - DNA, 100 bp, synthetic construct
  source 1..100: mol_type = other DNA
tctaagtaagttaaaagtagactttgggtatttaccgagatctctgcaaacacagaacttctgttctcaagtgtatcattttatatcactagctgttaaa

SEQ ID NO: 1267 - DNA, 100 bp, synthetic construct
  source 1..100: mol_type = other DNA
ccttaagtttaaaaaaaggtatctgtgctctcaaggctttaaactttgtgtttaaaagttttagagccttgagagcacttctctaaaactaaaaattgtt

SEQ ID NO: 1268 - DNA, 100 bp, synthetic construct
  source 1..100: mol_type = other DNA
cctttagaagttaaaaaacagacgttaaaacttgtaaattctagtatcagtagctttaaaacacaaacaaaaaatacactagaaaaatacagcaagatta

SEQ ID NO: 1269 - DNA, 100 bp, synthetic construct
  source 1..100: mol_type = other DNA
cttagtaagtttaaaaacagaaaaaaaaccgtgttgctacagctataaacttcaaacatgcagtttatagcagtgggcaacacgtctcatctcaaaaatt

SEQ ID NO: 1270 - DNA, 100 bp, synthetic construct
  source 1..100: mol_type = other DNA
cctaagtcagtacaaaaacagaaagtccgcgctcttactgcttgatacttcaacaagaagttacagcagtgagagcgctgctacattatttagaacttcc

SEQ ID NO: 1271 - DNA, 100 bp, synthetic construct
  source 1..100: mol_type = other DNA
ctgttactagtttaaaaacagaagttgctactcgttaaaaagtactaaacaaacaagctttttaaaacttagctttaaaaaatcaacaataattttgaac

SEQ ID NO: 1272 - DNA, 100 bp, synthetic construct
  source 1..100: mol_type = other DNA
cttccgtaagtaaaaaacagaactgtgctttaaactgtttttaacagaaacgccttgcgtcaaaatgaaagttcttaagtaaaagcgctcgtatcaaaat

SEQ ID NO: 1273 - DNA, 151 bp, synthetic construct
  source 1..151: mol_type = other DNA
gaccgcaccagcaccgcgacgtggaggacgatgatactcagcaacaggaggagcccactggcggcaagttctgctcagcggagtttctgcccggccaaacagcgtgtggaatttttggagcaggttttctgacttcggtcggaaaacccct

SEQ ID NO: 1274 - DNA, 151 bp, synthetic construct
  source 1..151: mol_type = other DNA
gaccggccacaactccctccttggcctttgaaagtcctttcatgaatacatccacggctaatgaattcctttacaccacactggaaaacataaaatacactttgagtggaatttttggagcaggttttctgacttcggtcggaaaacccct

SEQ ID NO: 1275 - DNA, 120 bp, synthetic construct
  source 1..120: mol_type = other DNA
cccaatttcactggtttcaaaaacagaaaaacagttctcgtttcaaaaacagattccccgctccccggtgtgtgagaggggctttgatccttctctggtttcctaggaaacgcgtatgtg

SEQ ID NO: 1276 - DNA, 10 bp, synthetic construct
  source 1..10: mol_type = other DNA
aaaaaggggg

SEQ ID NO: 1277 - DNA, 10 bp, synthetic construct
  source 1..10: mol_type = other DNA
aaaaaaaaaa

SEQ ID NO: 1278 - DNA, 20 bp, synthetic construct
  source 1..20: mol_type = other DNA
cccccggggggggggccccc

SEQ ID NO: 1279 - DNA, 10 bp, synthetic construct
  source 1..10: mol_type = other DNA
gggggggggg

SEQ ID NO: 1280 - protein, 10 aa, synthetic construct
FFFFFYYYYY

SEQ ID NO: 1281 - protein, 10 aa, synthetic construct
YYYYYYYYYY

SEQ ID NO: 1282 - protein, 20 aa, synthetic construct
LLLLLFFFFFYYYYYLLLLL

SEQ ID NO: 1283 - DNA, 414 bp, synthetic construct
  source 1..414: mol_type = other DNA
ttaacaacataggagctgtgattggctgttttcagccaatcagcactgactcatttgcatagcctttacaagcggtcacaaactcaagaaacgagcggttttaatagtcttttagaatattgtttatcgaaccgaataaggaactgtgctttgtgattcacatatcagtggaggggtgtggaaatggcaccttgatctcaccctcatcgaaagtggagttgatgtccttccctggctcgctacagacgcacttccgcaccggtggaatttttggagcaggttttctgacttcggtcggaaaacccctcccaatttcactggtctacaatgaaagcaaaacagttctcttccccgctccccggtgtgtgagaggggctttgatccttctctggtttcctaggaaacgcgtatgtg

SEQ ID NO: 1284 - DNA, 431 bp, synthetic construct
  source 1..431: mol_type = other DNA
taacaacataggagctgtgattggctgttttcagccaatcagcactgactcatgcaaatcaagagaaatgcaaatagcctttacaagcggtcacaaactcaagaaacgagcggttttaatagtcttttagaatattgtttatcgaaccgaataaggaactgtgctttgtgattcacatatcagtggaggggtgtggaaatggcaccttgataagtcaccatgagtgtaaagggaggttgatgtccttccctggctcgctacagacgcacttccgcaccggtggaatttttggagcaggttttctgacttcggtcggaaaacccctcccaatttcactggtttcaaaaacagaaaaacagttctcttccccgctccccggtgtgtgagaggggctttgatccttctctggtttcctaggaaacgcgtatgtg

SEQ ID NO: 1285 - DNA, 105 bp, synthetic construct
  source 1..105: mol_type = other DNA
nactgggagtggccattcgacgacagtgtggtgtaaaggaattcattagccatggatgtattcatgaaaggactttcaaaggccaaggagggagttgtggctgct

SEQ ID NO: 1286 - DNA, 105 bp, synthetic construct
  source 1..105: mol_type = other DNA
agcagccacaactccgggaacccctttgaaagtcctttcccgaatacatccacggctaaacttctcctttacaccacactgtcgtcgattaggccactcccagtn

SEQ ID NO: 1287 - DNA, 104 bp, synthetic construct
  source 1..104: mol_type = other DNA
caatttcactggtttcaaaaacagaaaaacagttctcttccccgctccccggtgtgtgagaggggctttgatccttctctggtttcctaggaaacgcgtatgtg

SEQ ID NO: 1288 - DNA, 102 bp, synthetic construct
  source 1..102: mol_type = other DNA
atttcactggtttcaaaaacagaaaaacagttctcttccccgctccccggtgtgtgagaggggctttgatccttctctggtttcctaggaaacgcgtatgtg

SEQ ID NO: 1289 - DNA, 100 bp, synthetic construct
  source 1..100: mol_type = other DNA
ttcactggtttcaaaaacagaaaaacagttctcttccccgctccccggtgtgtgagaggggctttgatccttctctggtttcctaggaaacgcgtatgtg

SEQ ID NO: 1290 - DNA, 150 bp, synthetic construct
  source 1..150: mol_type = other DNA
accggccacaactccctccttggcctttgaaagtcctttcatgaatacatccacggctaatgaattcctttacaccacactggaaaacataaaatacactttgagtggaatttttggagcaggttttctgacttcggtcggaaaacccct
